(19) United States
(12) Patent Application Publication
(10) Pub. No.: US 2011/0118340 A1
(43) Pub. Date: May 19, 2011

(54) DELIVERY OF RNAI CONSTRUCTS TO OLIGODENDROCYTES

(76) Inventors: Muthiah Manoharan, Cambridge, MA (US); Kallanthottathil G. Rajeev, Cambridge, MA (US); Dinah Sah, Cambridge, MA (US); William Querbes, Cambridge, MA (US); Pamela Tan, Kulmbach (DE); Qingmin Chen, Cambridge, MA (US)

(21) Appl. No.: 12/866,444

(22) PCT Filed: Feb. 6, 2009
(86) PCT No.: PCT/US09/33420

§ 371 Date: Jan. 24, 2011

Related U.S. Application Data
(60) Provisional application No. 61/027,340, filed on Feb. 8, 2008.
(60) Provisional application No. 61/033,910, filed on Mar. 5, 2008.
(60) Provisional application No. 61/039,069, filed on Mar. 24, 2008.
(60) Provisional application No. 61/085,683, filed on Aug. 1, 2008.
(60) Provisional application No. 61/105,376, filed on Oct. 14, 2008.

(51) Int. Cl. A61K 31/7088; A61P 31/12; A61P 25/00; A61P 25/18; A61P 25/16; A61P 25/28

(52) U.S. Cl. 514/44 R

(57) ABSTRACT

The invention provides methods for delivering a double-stranded nbonucleic acid (dsRNA) to the central nervous system of a subject, and particularly, to oligodendrocytes of a subject by localized delivery to the brain, e.g., to the corpus caïlosum. For example, the dsRNA molecules can include a first sequence that is selected from the Sroup consisting of the sense sequences of Tables 8, 10, 13-16, and a second sequence selected from the group consisting of the antisense sequences of Tables 8, 10, and 13-16. The dsRNA molecules can include naturally occurring nucleotides or can include at least one modified nucleotide, such as a 2′-O-methyl modified nucleotide, a nucleotide comprising a 5′-phosphorothioate group, or a terminal nucleotide linked to a conjugate group, such as to a cholesteryl derivative or a vitamin E group. Alternatively, the modified nucleotide may be chosen from the group consisting of a 2f-deoxy-2′-fliιioro modified nucleotide, a 2′-de-oxy-modified nucleotide, a locked nucleotide, an abasic nucleotide, 2′-amino-modified nucleotide, 2′-alkyl-modified nucleotide, morpholino nucleotide, a phosphoramidate, and a non-natural bas comprising nucleotide. Generally, such modified sequences will be based on a first sequence of a dsRNA selected from the group consisting of the sense sequences of Tables 8, 10, and 13-16, and a second sequence selected from the group consisting of the antisense sequences of Tables 8 10, and 13-16.

### CROSS-REFERENCE TO RELATED APPLICATIONS

[0001] This application claims priority to U.S. Application Ser. No. 61/027,340, filed Feb. 8, 2008; to U.S. Ser. No. 61/033,910, filed Mar. 5, 2008; to U.S. Ser. No. 61/039,069, filed Mar. 24, 2008; to U.S. Ser. No. 61/085,683, filed Aug. 1, 2008; and to U.S. Ser. No. 61/105,376, filed Oct. 14, 2008. The entire contents of all of these provisional applications are hereby incorporated by reference in the present application.

### FIELD OF THE INVENTION

[0002] This invention relates to methods of delivering an siRNA to the central nervous system of a subject by localized delivery to oligodendrocytes.

### BACKGROUND OF THE INVENTION

[0003] Progressive multifocal leukoencephalopathy (PML) is a fatal demyelinating disease of the central nervous system which results from reactivation of the latent polyomavirus JC virus (JCV) and its productive replication in glial cells of the human brain (Berger, J. R. (1995) J. Neurovirol. 1:5-18). Once a rare disease primarily seen in patients with impaired immune systems due to lymphoproliferative and myeloproliferative disorders, PML has become one of the major neurologic problems among patients with AIDS (Cinque, P., (2003). J. Neurovirol. 9 (Suppl. 1):88-92).

[0004] It has been reported that between 4 and 8% of AIDS patients exhibit signs of PML, and JCV has been detected in the cerebrospinal fluid of affected patients, suggesting that there is active replication of the virus in the brain (Berger, J. R. (1995) J. Neurovirol. 1:5-18, Clifford, D. B., (2001) J. Neurovirol. 4:279). In addition, PML has recently been seen in patients undergoing experimental treatment with Tysbari™, an anti-VLA4 antobody, in combination with interferon. The histological hallmarks of PML include multifocal demyelinated lesions with enlarged eosinophilic nuclei in oligodendrocytes and enlarged bizarre astrocytes with lobulated hyperchromatic nuclei within white matter tracts of the brain (Cinque, P., (2003). J. Neurovirol. 9 (Suppl. 1):88-92), although in some instances atypical features that include a unifocal pattern of demyelination and involvement of the gray matter have been reported (Sweeney, B. J., (1994). J. Neurol. Neurosurg. Psychiatry 57:994-997). Earlier observations from in vitro cell culture studies and an in vivo evaluation of JCV in clinical samples led to early assumptions that oligodendrocytes and astrocytes are the only cells that support productive viral infections (Gordon, J. (1998) Int. J. Mol. Med. 1:647-655). Accordingly, molecular studies have provided evidence for cell-type-specific transcription of the viral early genome in cells derived from the central nervous system (Raj, G. V., (1995) Virology 10:283-291). However, subsequent studies have shown low, but detectable, levels of JCV gene expression in normeural cells, including B cells, and noticeably high levels of production of the viral early protein in several neural and normeural tumor cells in humans (Gordon, J. (1998) Int. J. Mol. Med. 1:647-655, Khalili, K., 2003. Oncogene 22:5181-5191).

[0005] Like the other polyomaviruses, JCV is a small DNA virus whose genome can be divided into three regions that encompass the transcription control region; the genes responsible for the expression of the viral early protein, T antigen; and the genes encoding the viral late proteins, VP1, VP2, and VP3. In addition, the late genome is also responsible for production of an auxiliary viral protein, agnoprotein. T-antigen expression is pivotal for initiation of the viral lytic cycle, as this protein stimulates transcription of the late genes and induces the process of viral DNA replication. Recent studies have ascribed an important role for agnoprotein in the transcription and replication of JCV, as inhibition of its production significantly reduced viral gene expression and replication (M. Safak et al., unpublished observations). Furthermore, the agnoprotein dysregulates the cell cycle by altering the expression of several cyclins and their associated kinases (Darbinyan, A., (2002) Oncogene 21:5574-5581).

[0006] Thus far, there are no effective therapies for the suppression of JCV replication and the treatment of PML. Cytosine arabinoside (AraC) has been tested for the treatment of PML patients, and the outcome in some instances revealed a remission of JCV-associated demyelination (Aksamit, A. (2001) J. Neurovirol. 7:386-390). Reports from the AIDS Clinical Trial Group Organized Trial 243, however, have suggested that there is no difference in the survival of human immunodeficiency virus type 1 (HIV-1)-infected patients with PML and that of the control population, although in other reports it has been suggested that the failure of AraC in the AIDS Clinical Trial Group trial may have been due to insufficient delivery of the AraC via the intravenous and intrathecal routes (Levy, R. M., (2001) J. Neurovirol. 7:382-385). Based on in vitro studies showing the ability of inhibitors of topoisomerase to suppress JCV DNA replication, the topoisomerase inhibitor topotecan was used for the treatment of AIDS-PML patients, and the results suggested that topotecan treatment may be associated with a decreased lesion size and prolonged survival (Royal, W., III, (2003) J. Neurovirol. 9:411-419).

[0007] Double-stranded RNA molecules (dsRNA) have been shown to block gene expression in a highly conserved regulatory mechanism known as RNA interference (RNAi). WO 99/32619 (Fire et al.) discloses the use of a dsRNA of at least 25 nucleotides in length to inhibit the expression of genes in C. elegans. dsRNA has also been shown to degrade target RNA in other organisms, including plants (see, e.g., WO 99/53050, Waterhouse et al.; and WO 99/61631, Heifetz et al.), Drosophila (see, e.g., Yang, D., et al., Curr. Biol. (2000) 10:1191-1200), and mammals (see WO 00/44895, Limmer; and DE 101 00 586.5, Kreutzer et al.). This natural mechanism has now become the focus for the development of a new class of pharmaceutical agents for treating disorders that are caused by the aberrant or unwanted regulation of a gene.

### SUMMARY OF THE INVENTION

[0008] The invention provides methods for delivering a double-stranded ribonucleic acid (dsRNA) to the central nervous system of a subject, and particularly, to oligodendrocytes of a subject by localized delivery to the brain, e.g., to the corpus callosum.

[0009] In one aspect, the invention provides, a method for delivering a nucleic acid drug, e.g., a dsRNA, to a subject, e.g., to the oligodendrocytes of a subject. The subject can be a mammal, such as a human or non-human primate. Delivery can be, for example, by localized delivery, e.g., injection or infusion, into the brain, such as into white matter of the brain, e.g., into the corpus callosum. In another embodiment, the dsRNA is delivered by intrastriatal infusion, into the striatum, such as into the corpus striatum. In one embodiment, delivery to oligodendrocytes is by infusion to the corpus callosum.

[0010] In one embodiment, the nucleic acid drug is a double-stranded ribonucleic acid (dsRNA) molecule for inhibiting the expression of one of the genes of the JC virus and for inhibiting viral replication. The dsRNA can include at least two sequences that are complementary to each other. The dsRNA can include a sense strand comprising a first sequence and an antisense strand comprising a second sequence. The antisense strand comprises a nucleotide sequence which is substantially complementary to at least part of an mRNA encoded by a gene from the JC Virus, and the region of complementarity is typically less than 30 nucleotides in length, generally 19-24 nucleotides in length. In one embodiment, the dsRNA, when evaluated in an in vitro assay described herein, inhibits expression of a gene from the JC Virus by at least 40%.

[0011] For example, the dsRNA molecules can include a first sequence that is selected from the group consisting of the sense sequences of Tables 8, 10, 13-16, and a second sequence selected from the group consisting of the antisense sequences of Tables 8, 10, and 13-16. The dsRNA molecules can include naturally occurring nucleotides or can include at least one modified nucleotide, such as a 2′-O-methyl modified nucleotide, a nucleotide comprising a 5′-phosphorothioate group, or a terminal nucleotide linked to a conjugate group, such as to a cholesteryl derivative or a vitamin E group. Alternatively, the modified nucleotide may be chosen from the group consisting of a 2′-deoxy-2′-fluoro modified nucleotide, a 2′-deoxy-modified nucleotide, a locked nucleotide, an abasic nucleotide, 2′-amino-modified nucleotide, 2′-alkyl-modified nucleotide, morpholino nucleotide, a phosphoramidate, and a non-natural base comprising nucleotide. Generally, such modified sequences will be based on a first sequence of a dsRNA selected from the group consisting of the sense sequences of Tables 8, 10, and 13-16, and a second sequence selected from the group consisting of the antisense sequences of Tables 8, 10, and 13-16.

[0012] In one embodiment, the dsRNA targets VP1, T antigen, VP2 or VP3. In another embodiment, only a single gene, e.g., VP1, is targeted. In yet another embodiment, the T Antigen gene is targeted. In yet another embodiment, more than one type of dsRNA is administered, but only one gene is targeted.

[0013] In one embodiment, the dsRNA does not activate the immune system, e.g., it does not increase cytokine levels, such as TNF-alpha or IFN-alpha levels. For example, when measured by an assay, such as an in vitro PBMC assay, such as described herein, the increase in levels of TNF-alpha or IFN-alpha, is less than 30%, 20%, or 10% of control cells treated with a control dsRNA, such as a dsRNA that does not target a JC Virus gene.

[0014] In another aspect, the invention provides a method for inhibiting the expression of a JC virus gene in a subject. The subject can be a mammal, such as a human or non-human primate. The method includes delivery, e.g., localized delivery, such as by injection or infusion, of a nucleic acid drug, such as a dsRNA, into a region of the brain, such as into the corpus callosum. In one embodiment, the method provides delivery to oligodendrocytes by infusion into the corpus callosum.

[0015] In one embodiment, the invention provides oligonucleotides and method for silencing CNPase mRNA in a subject. The subject can be a mammal, such as a human or non-human primate. The method includes delivery, e.g., localized delivery, such as by injection, infusion or intraparenchymal convection enhanced delivery (CED) of a nucleic acid drug, such as a dsRNA, into a region of the brain, such as into the corpus callosum. In one embodiment, the method provides delivery to oligodendrocytes by infusion into the corpus callosum.

[0016] In one embodiment, the nucleic acid drug is a double-stranded ribonucleic acid (dsRNA) molecule for inhibiting the expression of one of the genes of the JC virus and for inhibiting viral replication. The dsRNA can include at least two sequences that are complementary to each other. The dsRNA can include a sense strand having a first sequence and an antisense strand having a second sequence. The antisense strand includes a nucleotide sequence that is substantially complementary to at least part of an mRNA encoded by a gene from the JC Virus, and the region of complementarity is less than 30 nucleotides in length, generally 19-24 nucleotides, e.g., 19 to 21 nucleotides in length. In some embodiments, the dsRNA is from about 10 to about 15 nucleotides, and in other embodiments the dsRNA is from about 25 to about 30 nucleotides in length. In a one embodiment, the dsRNA, when evaluated in an in vitro assay described herein, inhibits expression of a gene from the JC Virus by at least 40%.

[0017] For example, the dsRNA molecules can include a first sequence selected from the group consisting of the sense sequences of Tables 8, 10, and 13-16, and a second sequence selected from the group consisting of the antisense sequences of Tables 8, 10, and 13-16. The dsRNA molecules can include naturally occurring nucleotides and can also include at least one modified nucleotide, such as a 2′-O-methyl modified nucleotide, a nucleotide comprising a 5′-phosphorothioate group, or a terminal nucleotide linked to conjugate group, such as to a cholesteryl derivative or vitamin E group. Alternatively, the modified nucleotide may be chosen from the group consisting of a 2′-deoxy-2′-fluoro modified nucleotide, a 2′-deoxy-modified nucleotide, a locked nucleotide, an abasic nucleotide, 2′-amino-modified nucleotide, 2′-alkyl-modified nucleotide, morpholino nucleotide, a phosphoramidate, and a non-natural base comprising nucleotide. Generally, such modified sequences of a dsRNA will be based on a first sequence selected from the group consisting of the sense sequences of Tables 8, 10, and 13-16, and a second sequence selected from the group consisting of the antisense sequences of Tables 8, 10, and 13-16.

[0018] In one embodiment, the dsRNA targets VP1, T antigen, VP2 or VP3. In another embodiment, only a single gene, e.g., VP1, is targeted. In yet another embodiment, the T Antigen gene is targeted. In yet another embodiment, more than one type of dsRNA is administered, but only one gene is targeted.

[0019] In one embodiment, the dsRNA does not activate the immune system, e.g., it does not increase cytokine levels, such as TNF-alpha or IFN-alpha levels. For example, when measured by an assay, such as an in vitro PBMC assay, such as described herein, the increase in levels of TNF-alpha or IFN-alpha, is less than 30%, 20%, or 10% of control cells treated with a control dsRNA, such as a dsRNA that does not target a JC Virus gene.

[0020] In another aspect, the invention provides a method for treating, preventing, delaying or managing a pathological process or symptom mediated by JC virus infection, such as PML, in a subject. The subject can be a mammal, such as a human or non-human primate. The method includes delivery, e.g., localized delivery, such as by injection or infusion, of a therapeutic amount of a nucleic acid drug, e.g., a dsRNA, into the white matter of the brain, such as into the corpus callosum of the subject. In one embodiment, the method provides delivery to oligodendrocytes by infusion into the corpus callosum (e.g., by intracallosal infusion). In another embodiment, the method treats, prevents or delays development of a brain tumor, such as a glioblastoma multiforme.

[0021] In one embodiment, the nucleic acid drug is a double-stranded ribonucleic acid (dsRNA) molecule for inhibiting the expression of one of the genes of the JC virus and for inhibiting viral replication. The dsRNA can include at least two sequences that are complementary to each other. The dsRNA can include a sense strand having a first sequence and an antisense strand having a second sequence. The antisense strand includes a nucleotide sequence that is substantially complementary to at least part of an mRNA encoded by a gene from the JC Virus, and the region of complementarity is typically less than 30 nucleotides in length, generally 19-24 nucleotides in length. In one embodiment, the dsRNA, when evaluated in an in vitro assay described herein, inhibits expression of a gene from the JC Virus by at least 40%.

[0022] For example, the dsRNA molecule can include a first sequence selected from the group consisting of the sense sequences of Tables 8, 10, and 13-16, and a second sequence selected from the group consisting of the antisense sequences of Tables 8, 10, and 13-16. The dsRNA molecules can include naturally occurring nucleotides and can also include at least one modified nucleotide, such as a 2′-O-methyl modified nucleotide, a nucleotide comprising a 5′-phosphorothioate group, or a terminal nucleotide linked to a conjugate group, such as to a cholesteryl derivative or a vitamin E group. Alternatively, the modified nucleotide may be chosen from the group consisting of a 2′-deoxy-2′-fluoro modified nucleotide, a 2′-deoxy-modified nucleotide, a locked nucleotide, an abasic nucleotide, 2′-amino-modified nucleotide, 2′-alkyl-modified nucleotide, morpholino nucleotide, a phosphoramidate, and a non-natural base comprising nucleotide. Generally, such modified sequences of a dsRNA will be based on a first sequence selected from the group consisting of the sense sequences of Tables 8, 10, and 13-16, and a second sequence selected from the group consisting of the antisense sequences of Tables 8, 10, and 13-16.

[0023] In one embodiment, the dsRNA targets VP1, T antigen, VP2 or VP3. In another embodiment, only a single gene, e.g., VP1, is targeted. In yet another embodiment, the T Antigen gene is targeted. In yet another embodiment, more than one type of dsRNA is administered, but only one gene is targeted.

[0024] In another embodiment, the dsRNA does not activate the immune system, e.g., it does not increase cytokine levels, such as TNF-alpha or IFN-alpha levels. For example, when measured by an assay, such as an in vitro PBMC assay, such as described herein, the increase in levels of TNF-alpha or IFN-alpha, is less than 30%, 20%, or 10% of control cells treated with a control dsRNA, such as a dsRNA that does not target a JC Virus gene.

[0025] In one aspect, the invention provides a pharmaceutical composition for inhibiting the replication of the JC virus in an organism, generally a human subject, containing one or more of a dsRNA featured in the invention and a pharmaceutically acceptable carrier or delivery vehicle and disposed in a device configured to provide localized delivery to the brain, such as into the white matter of the brain, e.g., into the corpus callosum. Delivery can further be administered directly into oligodendrocytes, such as into oligodendrocytes of the corpus callosum. Delivery can also be into the striatum, such as by intrastriatal infusion.

[0026] In another embodiment, the invention provides vectors for inhibiting the expression of a gene of the JC virus in a cell, where the vector includes a regulatory sequence operably linked to a nucleotide sequence that encodes at least one strand of one of the dsRNAs featured in the invention.

[0027] In another embodiment, the invention provides a cell containing a vector for inhibiting the expression of a gene of the JC virus in a cell. The vector includes a regulatory sequence operably linked to a nucleotide sequence that encodes at least one strand of one of the dsRNAs featured in the invention.

[0028] In another aspect, the invention provides a method for delivering a double-stranded ribonucleic acid (dsRNA) to the central nervous system of a subject, and particularly, to oligodendrocytes of a subject by localized delivery to the brain, e.g., to the corpus callosum.

[0029] In another aspect, the invention provides a method for delivering a dsRNA by localized delivery in to the corpus callosum of the subject, such as to an oligodendrocyte of the subject, where the dsRNA targets a CNPase nucleic acid. For example, the dsRNA targeting CNPase RNA can include a first sequence selected from the group consisting of the sense sequences of Tables 1, and 17-19, and a second sequence selected from the group consisting of the antisense sequences of Tables 1, and 17-19. In one embodiment, the dsRNA targeting CNPase is AD3222. In yet another aspect, the invention provides a method for treating, preventing or managing a neurological disorder mediated by CNPase in a subject, such as by delivering a dsRNA by localized delivery into the corpus callosum of the subject, such as into an oligodendrocyte of the subject. In certain embodiments, the CNPase RNA includes a first sequence selected from the group consisting of the sense sequences of Tables 1, and 17-19, and a second sequence selected from the group consisting of the antisense sequences of Tables 1, and 17-19. In one embodiment, the dsRNA targeting CNPase is AD3222. In other embodiments, the neurological disorder is schizophrenia or Down's Syndrome.

[0030] In another aspect, the invention provides a method for decreasing CNPase mRNA levels in a subject by, for example, delivering a dsRNA by localized delivery into the corpus callosum of the subject. In certain embodiments, the CNPase RNA includes a first sequence selected from the group consisting of the sense sequences of Tables 1, and 17-19, and a second sequence selected from the group consisting of the antisense sequences of Tables 1, and 17-19. In one embodiment, the dsRNA targeting CNPase is AD3222.

[0031] In yet another aspect, the invention features a method of treating a neurodegenerative disease in a subject by delivering a dsRNA by localized delivery into the central nervous system, such as into the corpus callosum (e.g., into an oligodendrocyte of the corpus callosum). In one embodiment the dsRNA targets a gene endogenous to the subject, and delivery of the dsRNA is for the treatment of, e.g., Parkinson's disease, multiple sclerosis, amyotrophic lateral sclerosis, autoimmune encephalomyelitis, Alzheimer's disease, stroke or Huntington's disease.

[0032] The details of one or more embodiments featured in the invention are set forth in the accompanying drawings and the description below. Other features, objects, and advantages featured in the invention will be apparent from the description and drawings, and from the claims.

### BRIEF DESCRIPTION OF THE FIGURES

[0033] FIGS. 1A, 1B, and 1C show silencing of CNP mRNA in vivo as measured by branched DNA analysis following intraparenchymal infusion of CNP siRNA AD-12436 into the corpus callosum of rats. FIG. 1A is a bar graph showing the specificity of AD-12436 against CNP mRNA, as compared to negative controls PBS and dsRNA AD-1955, which targets luciferase.

[0034] FIG. 1B is a bar graph showing the dose dependence of the gene-silencing effect of dsRNA on CNP RNA levels. FIG. 1C is a bar graph showing the sustained effected of dsRNA on RNA inhibition for up to seven days.

[0035] FIG. 2 illustrates cleavage of CNP mRNA in vivo as mediated by CNP siRNA AD-12436. The cleavage site was detected by 5′ RACE.

[0036] FIG. 3A is a graph showing silencing of rat CNPase. Data points marked with asterisks are statistically significant compared with PBS-treated animals (*** P<0.001, ** P<0.01; ANOVA). FIG. 3B is a graph showing silencing of primate CNPase.

[0037] FIG. 4 is a graph showing that VP1 siRNAs are more effective inhibitors when alone, than they are in combination with siTAg siRNAs.

[0038] FIGS. 5A and 5B are graphs showing that JCV siRNAs do not produce unwanted cytokine responses, as IFN-alpha (FIG. 5A) and TNF-alpha (FIG. 5B) levels remained low after contact with the siRNAs.

[0039] FIGS. 6A, 6B and 6C show silencing of CNP mRNA in vivo as measured by branched DNA analysis following intraparenchymal convection enhanced delivery (CED) of CNP siRNA AD-3222 and AD-3178 into the corpus callosum of rats. FIG. 6A is a bar graph comparing the gene-silencing effect of CNP siRNA AD-3222 and AD-3178. FIG. 6B is a bar graph showing the dose dependence of the gene-silencing effect of AD-3222 on CNP RNA levels. FIG. 6C is a bar graph showing the sustained effected of AD-3222 on RNA inhibition for up to seven days. FIG. 6D is a bar graph comparing the gene-silencing effect of CNP siRNA AD-3222 and AD-12436 with intrastriatal or intracortical CED infusion. Data points marked with asterisks are statistically significant compared with PBS-treated animals (*** P<0.001, ** P<0.01, * P<0.05; PBS Two-way ANOVA).

[0040] FIGS. 7A and 7B show silencing of CNP mRNA in vivo as measured by branched DNA analysis following intraparenchymal convection enhanced delivery (CED) of CNP siRNA AD-3181 and AD-3569 into the corpus callosum of rats. FIG. 7A is bar graph showing the dose dependence of the gene-silencing effect of AD-3181 on CNP RNA levels. FIG. 7B is a bar graph comparing the gene-silencing effect of CNP siRNA AD-3181 and AD-3569. FIG. 7C is a bar graph comparing the gene-silencing effect of CNP siRNA AD-3569 with dicer CNP siRNA AD-18233. Data points marked with asterisks are statistically significant compared with PBS-treated animals (*** P<0.001, ** P<0.01, * P<0.05; PBS Two-way ANOVA).

[0041] FIG. 8 is a bar graph comparing the gene-silencing effect of CNP siRNA AD-3569 and AD-18528.

[0042] FIGS. 9A and 9B are the complete genome sequence of JC virus as found at GenBank Accession No. NC_{—}001699 (GenBank version dated Dec. 24, 2007).

[0043] FIGS. 10A and 10B are the sequence of the human CNPase mRNA transcript as reported at GenBank Accession No. NM_{—}033133 (GenBank version dated Jan. 13, 2008).

### DETAILED DESCRIPTION OF THE INVENTION

[0044] The invention provides methods of administering double-stranded ribonucleic acid (dsRNA) into a cell of the central nervous system (CNS), such as an oligodendrocyte, for inhibiting the expression of a gene in the central nervous system of a mammal by localized delivery to the brain, such as to the corpus callosum or into other areas of white matter. The dsRNA can target, e.g., an endogenous gene, such as the CNPase gene, or a gene from a pathogen, such as a virus, e.g., the JC Virus. The invention also provides compositions and methods for treating pathological conditions and diseases in a mammal caused by JC virus infection using dsRNAs. A dsRNA directs the sequence-specific degradation of mRNA through a process known as RNA interference (RNAi).

[0045] The dsRNA suitable for use in the methods described herein include an RNA strand (the antisense strand) having a region that is less than 30 nucleotides in length, generally 19-24 nucleotides in length, and that is substantially complementary to at least part of an mRNA transcript of a gene from the JC Virus. The use of these dsRNAs enables the targeted degradation of mRNAs of genes that are implicated in replication and or maintenance of JC virus infection and the occurance of PML in a subject infected with the JC virus. Using cell-based and animal assays, the present inventors have demonstrated that very low dosages of these dsRNA can specifically and efficiently mediate RNAi, resulting in significant inhibition of expression of a gene from the JC Virus. Thus, the methods and compositions featured herein include dsRNAs useful for treating pathological processes mediated by JC viral infection, e.g. cancer, by targeting a gene involved in JC virus relication and/or maintainance in a cell.

[0046] The following detailed description discloses how to make and use the dsRNA and compositions containing dsRNA to inhibit the expression of a gene from the JC virus, as well as compositions and methods for treating diseases and disorders caused by the infection with the JC virus, such as PML. The pharmaceutical compositions suitable for use in the featured methods include a dsRNA having an antisense strand with a region of complementarity that is less than 30 nucleotides in length, generally 19-24 nucleotides in length, and is substantially complementary to at least part of an RNA transcript of a gene from the JC Virus, together with a pharmaceutically acceptable carrier.

[0047] Accordingly, in certain aspects, pharmaceutical compositions containing the dsRNAs described herein together with a pharmaceutically acceptable carrier, methods of using the compositions to inhibit expression of a gene from the JC Virus, and methods of using the pharmaceutical compositions to treat diseases caused by infection with the JC virus are provided.

[0048] In one embodiment, the invention provides oligonucleotides and methods for silencing CNPase mRNA in a subject, comprising delivering a dsRNA by localized delivery into the corpus callosum of the subject, wherein said dsRNA selected from the group consisting of duplex numbers AD3178, AD3222, AD12436, AD3181 and AD3569. The subject can be a mammal, such as a human or non-human primate. The method includes delivery, e.g., localized delivery, such as by injection, infusion or intraparenchymal convection enhanced delivery (CED) of a nucleic acid drug, such as a dsRNA, into a region of the brain, such as into the corpus callosum. In one embodiment, the method provides delivery to oligodendrocytes by infusion into the corpus callosum.

[0049] In one embodiment, a dsRNA delivered directly to a cell in the brain, such as to an oligodendrocyte in the brain, inhibits expression of a huntingtin gene, PDGF beta gene, Erb-B gene, Src gene, CRK gene, GRB2 gene, RAS gene, MEKK gene, JNK gene, RAF gene, Erk1/2 gene, PCNA(p21) gene, MYB gene, JUN gene, FOS gene, BCL-2 gene, Cyclin D gene, VEGF gene, EGFR gene, Cyclin A gene, Cyclin E gene, WNT-1 gene, beta-catenin gene, c-MET gene, PKC gene, NFKB gene, STAT3 gene, survivin gene, Her2/Neu gene, topoisomerase I gene, topoisomerase II alpha gene, mutations in the p73 gene, mutations in the p21 (WAF1/CIP1) gene, mutations in the p27(KIP1) gene, mutations in the PPM1D gene, mutations in the RAS gene, mutations in the caveolin I gene, mutations in the MIB I gene, mutations in the MTAI gene, mutations in the M68 gene, mutations in tumor suppressor genes, mutations in the p53 tumor suppressor gene, mutations in the p53 family member DN-p63, mutations in the pRb tumor suppressor gene, mutations in the APC1 tumor suppressor gene, mutations in the BRCA1 tumor suppressor gene, mutations in the PTEN tumor suppressor gene, mLL fusion gene, BCR/ABL fusion gene, TEL/AML1 fusion gene, EWS/FLI1 fusion gene, TLS/FUS1 fusion gene, PAX3/FKHR fusion gene, AML1/ETO fusion gene, alpha v-integrin gene, Flt-1 receptor gene, tubulin gene, Human Papilloma Virus gene, a gene required for Human Papilloma Virus replication, Human Immunodeficiency Virus gene, a gene required for Human Immunodeficiency Virus replication, Hepatitis A Virus gene, a gene required for Hepatitis A Virus replication, Hepatitis B Virus gene, a gene required for Hepatitis B Virus replication, Hepatitis C Virus gene, a gene required for Hepatitis C Virus replication, Hepatitis D Virus gene, a gene required for Hepatitis D Virus replication, Hepatitis E Virus gene, a gene required for Hepatitis E Virus replication, Hepatitis F Virus gene, a gene required for Hepatitis F Virus replication, Hepatitis G Virus gene, a gene required for Hepatitis G Virus replication, Hepatitis H Virus gene, a gene required for Hepatitis H Virus replication, Respiratory Syncytial Virus gene, a gene that is required for Respiratory Syncytial Virus replication, Herpes Simplex Virus gene, a gene that is required for Herpes Simplex Virus replication, herpes Cytomegalovirus gene, a gene that is required for herpes Cytomegalovirus replication, herpes Epstein Barr Virus gene, a gene that is required for herpes Epstein Barr Virus replication, Kaposi's Sarcoma-associated Herpes Virus gene, a gene that is required for Kaposi's Sarcoma-associated Herpes Virus replication, JC Virus gene, human gene that is required for JC Virus replication, myxovirus gene, a gene that is required for myxovirus gene replication, rhinovirus gene, a gene that is required for rhinovirus replication, coronavirus gene, a gene that is required for coronavirus replication, West Nile Virus gene, a gene that is required for West Nile Virus replication, St. Louis Encephalitis gene, a gene that is required for St. Louis Encephalitis replication, Tick-borne encephalitis virus gene, a gene that is required for Tick-borne encephalitis virus replication, Murray Valley encephalitis virus gene, a gene that is required for Murray Valley encephalitis virus replication, dengue virus gene, a gene that is required for dengue virus gene replication, Simian Virus 40 gene, a gene that is required for Simian Virus 40 replication, Human T Cell Lymphotropic Virus gene, a gene that is required for Human T Cell Lymphotropic Virus replication, Moloney-Murine Leukemia Virus gene, a gene that is required for Moloney-Murine Leukemia Virus replication, encephalomyocarditis virus gene, a gene that is required for encephalomyocarditis virus replication, measles virus gene, a gene that is required for measles virus replication, Vericella zoster virus gene, a gene that is required for Vericella zoster virus replication, adenovirus gene, a gene that is required for adenovirus replication, yellow fever virus gene, a gene that is required for yellow fever virus replication, poliovirus gene, a gene that is required for poliovirus replication, poxvirus gene, a gene that is required for poxvirus replication, plasmodium gene, a gene that is required for plasmodium gene replication, Mycobacterium ulcerans gene, a gene that is required for Mycobacterium ulcerans replication, Mycobacterium tuberculosis gene, a gene that is required for Mycobacterium tuberculosis replication, Mycobacterium leprae gene, a gene that is required for Mycobacterium leprae replication, Staphylococcus aureus gene, a gene that is required for Staphylococcus aureus replication, Streptococcus pneumoniae gene, a gene that is required for Streptococcus pneumoniae replication, Streptococcus pyogenes gene, a gene that is required for Streptococcus pyogenes replication, Chlamydia pneumoniae gene, a gene that is required for Chlamydia pneumoniae replication, Mycoplasma pneumoniae gene, a gene that is required for Mycoplasma pneumoniae replication, an integrin gene, a selectin gene, complement system gene, chemokine gene, chemokine receptor gene, GCSF gene, Gro1 gene, Gro2 gene, Gro3 gene, PF4 gene, MIG gene, Pro-Platelet Basic Protein gene, MIP-1I gene, MIP-1J gene, RANTES gene, MCP-1 gene, MCP-2 gene, MCP-3 gene, CMBKR1 gene, CMBKR2 gene, CMBKR3 gene, CMBKR5v, AIF-1 gene, 1-309 gene, a gene to a component of an ion channel, a gene to a neurotransmitter receptor, a gene to a neurotransmitter ligand, amyloid-family gene, presenilin gene, HD gene, DRPLA gene, SCA1 gene, SCA2 gene, MJD1 gene, CACNL1A4 gene, SCAT gene, SCA8 gene, allele gene found in LOH cells, or one allele gene of a polymorphic gene.

[0050] According to one aspect, the invention provides a method of treating a neurodegenerative disorder. As used herein, the phrase “neurodegenerative disorder” refers to any disorder, disease or condition of the nervous system (such as the CNS) which is characterized by gradual and progressive loss of neural tissue, neurotransmitter, or neural functions. Examples of neurodegenerative disorder include Parkinson's disease, multiple sclerosis, amyotrophic lateral sclerosis, autoimmune encephalomyelitis, Alzheimer's disease, stroke and Huntington's disease.

### I. DEFINITIONS

[0051] For convenience, the meaning of certain terms and phrases used in the specification, examples, and appended claims, are provided below. If there is an apparent discrepancy between the usage of a term in other parts of this specification and its definition provided in this section, the definition in this section shall prevail.

[0052] As used herein, localized delivery to the corpus callosum, refers to local delivery by direct introduction of the drug into oligodendrocytes, such as oligodendrocytes of the corpus callosum. Localized delivery includes by injection or infusion. Localized delivery excludes systemic administration.

[0053] “G,” “C,” “A,” “T,” and “U” each generally stand for a nucleotide that contains guanine, cytosine, adenine, thymidine and uracil as a base, respectively. However, it will be understood that the term “ribonucleotide” or “nucleotide” can also refer to a modified nucleotide, as further detailed below, or a surrogate replacement moiety. The skilled person is well aware that guanine, cytosine, adenine, thymidine and uracil may be replaced by other moieties without substantially altering the base pairing properties of an oligonucleotide comprising a nucleotide bearing such replacement moiety. For example, without limitation, a nucleotide comprising inosine as its base may base pair with nucleotides containing adenine, cytosine, or uracil. Hence, nucleotides containing uracil, guanine, or adenine may be replaced in the nucleotide sequences featured in the invention by a nucleotide containing, for example, inosine. In another example, adenine and cytosine anywhere in the oligonucleotide can be replaced with guanine and uracil, respectively to form G-U Wobble base pairing with the target mRNA. Sequences having such replacement moieties are embodiments featured in the invention.

[0054] As used herein, “JC virus” refers to the latent polyomavirus JC Virus that has a reference sequence at GenBank Accession No. NC_{—}001699 (GenBank version dated Dec. 24, 2007) (see also FIGS. 9A and 9B). JC Virus is also known as JC polyomavirus. Other accession numbers of various JCVirus sequences include AB038249.1-AB038255.1, AB048545.1-AB048582.1, AB074575.1-AB074591.1, AB077855.1-AB077879.1, AB081005.1-AB081030.1, AB081600.1-AB081618.1, AB081654.1, AB092578.1-AB092587.1, AB103387.1, AB103402.1-AB103423.1, AB104487.1, AB113118.1-AB113145.1, AB118651.1-AB118659.1, AB126981.1-AB127027.1, AB127342.1, AB127344.1, AB127346.1-AB127349.1, AB127352.1-AB127353.1, AB198940.1-AB198954.1, AB220939.1-AB220943.1, AF004349.1-AF004350.1, AF015526.1-AF015537.1, AF015684.1, AF030085.1, AF281599.1-AF281626.1, AF295731.1-AF295739.1, AF300945.1-AF300967.1, AF363830.1-AF363834.1, AF396422.1-AF396435.1, AY121907.1-AY121915.1, NC_{—}001699.1, U61771.1, U73500.1-U73502.1.

[0055] As used herein, “CNPase” refers to a gene in a cell. CNPase is also known as CNP; cyclic nucleotide phosphodiesterase; 2′,3′-cyclic nucleotide 3′ phosphodiesterase; CNP1; and 2′,3′ cyclic nucleotide 3′ phosphohydrolase. The sequence of a human CNPase mRNA transcript can be found at GenBank Accession No. NM_{—}033133 (GenBank version dated Jan. 13, 2008).

[0056] CNPase is an enzyme found mainly in the central nervous system of vertebrates. The enzyme is associated with myelin, including oligodendroglial plasma membrane and uncompacted myelin (myelin-like fraction), which are in contact with glial cytoplasm. CNPase is also firmly associated with tubulin from brain tissue. CNPase acts as a microtubule-associated protein in promoting microtubule assembly at higher mole ratios. CNPase catalyzes the hydrolysis of 2′,3′-cyclic nucleotides to produce 2′-nucleotides in vitro, and is a member of the 2H phosphoesterase family.

[0057] As used herein, “target sequence” refers to a contiguous portion of the nucleotide sequence of an mRNA molecule formed during the transcription of a gene from the JC Virus, including mRNA that is a product of RNA processing of a primary transcription product.

[0058] As used herein, the term “strand comprising a sequence” refers to an oligonucleotide comprising a chain of nucleotides that is described by the sequence referred to using the standard nucleotide nomenclature.

[0059] As used herein, and unless otherwise indicated, the term “complementary,” when used to describe a first nucleotide sequence in relation to a second nucleotide sequence, refers to the ability of an oligonucleotide or polynucleotide comprising the first nucleotide sequence to hybridize and form a duplex structure under certain conditions with an oligonucleotide or polynucleotide comprising the second nucleotide sequence, as will be understood by the skilled person. Such conditions can, for example, be stringent conditions, where stringent conditions may include: 400 mM NaCl, 40 mM PIPES pH 6.4, 1 mM EDTA, 50° C. or 70° C. for 12-16 hours followed by washing. Other conditions, such as physiologically relevant conditions as may be encountered inside an organism, can apply. The skilled person will be able to determine the set of conditions most appropriate for a test of complementarity of two sequences in accordance with the ultimate application of the hybridized nucleotides.

[0060] This includes base-pairing of the oligonucleotide or polynucleotide havng the first nucleotide sequence to the oligonucleotide or polynucleotide having the second nucleotide sequence over the entire length of the first and second nucleotide sequence. Such sequences can be referred to as “fully complementary” with respect to each other herein. However, where a first sequence is referred to as “substantially complementary” with respect to a second sequence herein, the two sequences can be fully complementary, or they may form one or more, but generally not more than 4, 3 or 2 mismatched base pairs upon hybridization, while retaining the ability to hybridize under the conditions most relevant to their ultimate application. However, where two oligonucleotides are designed to form, upon hybridization, one or more single stranded overhangs, such overhangs shall not be regarded as mismatches with regard to the determination of complementarity. For example, a dsRNA having one oligonucleotide 21 nucleotides in length and another oligonucleotide 23 nucleotides in length, wherein the longer oligonucleotide comprises a sequence of 21 nucleotides that is fully complementary to the shorter oligonucleotide, may yet be referred to as “fully complementary” for the purposes of the invention.

[0061] “Complementary” sequences, as used herein, may also include, or be formed entirely from, non-Watson-Crick base pairs and/or base pairs formed from non-natural and modified nucleotides, in as far as the above requirements with respect to their ability to hybridize are fulfilled.

[0062] The terms “complementary”, “fully complementary” and “substantially complementary” herein may be used with respect to the base matching between the sense strand and the antisense strand of a dsRNA, or between the antisense strand of a dsRNA and a target sequence, as will be understood from the context of their use.

[0063] As used herein, a polynucleotide that is “substantially complementary to at least part of” a messenger RNA (mRNA) refers to a polynucleotide that is substantially complementary to a contiguous portion of the mRNA of interest (e.g., encoding JC virus). For example, a polynucleotide is complementary to at least a part of a JC virus mRNA if the sequence is substantially complementary to a non-interrupted portion of a mRNA encoding JC virus.

[0064] The term “double-stranded RNA” or “dsRNA”, as used herein, refers to a complex of ribonucleic acid molecules, having a duplex structure comprising two anti-parallel and substantially complementary, as defined above, nucleic acid strands. The two strands forming the duplex structure may be different portions of one larger RNA molecule, or they may be separate RNA molecules. Where the two strands are part of one larger molecule, and therefore are connected by an uninterrupted chain of nucleotides between the 3′-end of one strand and the 5′ end of the respective other strand forming the duplex structure, the connecting RNA chain is referred to as a “hairpin loop”. Where the two strands are connected covalently by means other than an uninterrupted chain of nucleotides between the 3′-end of one strand and the 5′ end of the respective other strand forming the duplex structure, the connecting structure is referred to as a “linker”. The RNA strands may have the same or a different number of nucleotides. The maximum number of base pairs is the number of nucleotides in the shortest strand of the dsRNA minus any overhangs that are present in the duplex. In addition to the duplex structure, a dsRNA may comprise one or more nucleotide overhangs. dsRNAs as used herein are also referred to as “siRNAs” (short interfering RNAs).

[0065] As used herein, a “nucleotide overhang” refers to the unpaired nucleotide or nucleotides that protrude from the duplex structure of a dsRNA when a 3′-end of one strand of the dsRNA extends beyond the 5′-end of the other strand, or vice versa. “Blunt” or “blunt end” means that there are no unpaired nucleotides at that end of the dsRNA, i.e., no nucleotide overhang. A “blunt ended” dsRNA is a dsRNA that is double-stranded over its entire length, i.e., no nucleotide overhang at either end of the molecule.

[0066] The term “antisense strand” refers to the strand of a dsRNA that includes a region that is substantially complementary to a target sequence. As used herein, the term “region of complementarity” refers to the region on the antisense strand that is substantially complementary to a sequence, for example a target sequence, as defined herein. Where the region of complementarity is not fully complementary to the target sequence, the mismatches may be in the internal or terminal regions of the molecule. Generally, the most tolerated mismatches are in the terminal regions, e.g., within 6, 5, 4, 3, or 2 nucleotides of the 5′ and/or 3′ terminus.

[0067] The term “sense strand,” as used herein, refers to the strand of a dsRNA that includes a region that is substantially complementary to a region of the antisense strand.

[0068] “Introducing into a cell,” when referring to a dsRNA, means facilitating uptake or absorption into the cell, as is understood by those skilled in the art. Absorption or uptake of dsRNA can occur through unaided diffusive or active cellular processes, or by auxiliary agents or devices. The meaning of this term is not limited to cells in vitro; a dsRNA may also be “introduced into a cell,” where the cell is part of a living organism. In such instance, introduction into the cell will include the delivery to the organism. For example, for in vivo delivery, dsRNA can be injected into a tissue site or administered systemically. In vivo delivery can also be by a beta-glucan delivery system, such as those described in U.S. Pat. Nos. 5,032,401 and 5,607,677, and U.S. Publication No. 2005/0281781. U.S. Pat. Nos. 5,032,401 and 5,607,677, and U.S. Publication No. 2005/0281781 are hereby incorporated by reference in their entirety. In vitro introduction into a cell includes methods known in the art such as electroporation and lipofection.

[0069] The terms “silence” and “inhibit the expression of,” “down-regulate the expression of,” “suppress the expression of,” and the like, in as far as they refer to a target gene, e.g., gene from JC Virus, herein refer to the at least partial suppression of the expression of a target gene, e.g., from the JC Virus, as manifested by a reduction of the amount of target mRNA, e.g., JC Virus mRNA, which may be isolated from a first cell or group of cells in which a target gene is transcribed and which has or have been treated such that the expression of a target gene is inhibited, as compared to a second cell or group of cells substantially identical to the first cell or group of cells but which has or have not been so treated (control cells). The degree of inhibition is usually expressed in terms of

$$\frac{( mRNA in control cells ) - ( mRNA in treated cells )}{( mRNA in control cells )} \cdot 100 \%$$

[0070] Alternatively, the degree of inhibition may be given in terms of a reduction of a parameter that is functionally linked to target gene expression, e.g., the amount of protein encoded by a gene from the JC Virus, or the number of cells displaying a certain phenotype, e.g infection with the JC Virus. In principle, target genome silencing may be determined in any cell expressing the target, either constitutively or by genomic engineering, and by any appropriate assay. However, when a reference is needed in order to determine whether a given dsRNA inhibits the expression of a target gene by a certain degree and therefore is encompassed by the instant invention, the assay provided in the Examples below and those known in the art shall serve as such reference. For example, in certain instances, expression of a gene from the JC Virus is suppressed by at least about 5%, 10%, 15%, 20%, 25%, 30%, 35%, 40%, 45%, or 50% by administration of the double-stranded oligonucleotide. In some embodiments, a gene from the JC Virus is suppressed by at least about 60%, 70%, or 80% by administration of the double-stranded oligonucleotide. In some embodiments, a gene from the JC Virus is suppressed by at least about 85%, 90%, or 95% by administration of the double-stranded oligonucleotide.

[0071] As used herein in the context of JC virus expression, the terms “treat,” “treatment,” and the like, refer to relief from or alleviation of pathological processes mediated by JC virus infection. In the context of the present invention insofar as it relates to any of the other conditions recited herein below (other than pathological processes mediated by JC virus expression), the terms “treat,” “treatment,” and the like mean to relieve or alleviate at least one symptom associated with such condition, or to slow or reverse the progression of such condition. For example, administration of a dsRNA targeting JC virus to an oligodendrocyte of human having PML, can reduce one or more symptoms of PML, such as relief from the extreme weakness, lack of coordination or difficulty speaking experienced by those infected with PML.

[0072] As used herein, the phrases “therapeutically effective amount” and “prophylactically effective amount” refer to an amount that provides a therapeutic benefit in the treatment, prevention, or management of pathological processes mediated by JC virus infection or an overt symptom of pathological processes mediated by JC virus expression. The specific amount that is therapeutically effective can be readily determined by an ordinary medical practitioner, and may vary depending on factors known in the art, such as, for example, the type of pathological processes mediated by JC virus infection, the patient's history and age, the stage of pathological processes mediated by JC virus infection, and the administration of other anti-pathological processes mediated by JC virus infection.

[0073] As used herein, a “pharmaceutical composition” includes a pharmacologically effective amount of a dsRNA and a pharmaceutically acceptable carrier. As used herein, “pharmacologically effective amount,” “therapeutically effective amount” or simply “effective amount” refers to that amount of an RNA effective to produce the intended pharmacological, therapeutic or preventive result. For example, if a given clinical treatment is considered effective when there is at least a 25% reduction in a measurable parameter associated with a disease or disorder, a therapeutically effective amount of a drug for the treatment of that disease or disorder is the amount necessary to effect at least a 25% reduction in that parameter.

[0074] The term “pharmaceutically acceptable carrier” refers to a carrier for administration of a therapeutic agent. Such carriers include, but are not limited to, saline, buffered saline, dextrose, water, glycerol, ethanol, and combinations thereof. The term specifically excludes cell culture medium. For drugs administered orally, pharmaceutically acceptable carriers include, but are not limited to pharmaceutically acceptable excipients such as inert diluents, disintegrating agents, binding agents, lubricating agents, sweetening agents, flavoring agents, coloring agents and preservatives. Suitable inert diluents include sodium and calcium carbonate, sodium and calcium phosphate, and lactose, while corn starch and alginic acid are suitable disintegrating agents. Binding agents may include starch and gelatin, while the lubricating agent, if present, will generally be magnesium stearate, stearic acid or talc. If desired, the tablets may be coated with a material such as glyceryl monostearate or glyceryl distearate, to delay absorption in the gastrointestinal tract.

[0075] As used herein, a “transformed cell” is a cell into which a vector has been introduced from which a dsRNA molecule may be expressed.

### II. DOUBLE-STRANDED RIBONUCLEIC ACID (dsRNA)

[0076] In one embodiment, the invention provides double-stranded ribonucleic acid (dsRNA) molecules for inhibiting the expression of a gene from the JC Virus in a cell or mammal, where the dsRNA includes an antisense strand having a region of complementarity that is complementary to at least a part of an mRNA formed in the expression of a gene from the JC Virus, and where the region of complementarity is less than 30 nucleotides in length, generally 19-24 nucleotides in length, and where the dsRNA, upon contact with a cell expressing the gene from the JC virus, inhibits expression of the JC virus gene by at least 40%.

[0077] The dsRNA includes two RNA strands that are sufficiently complementary to hybridize to form a duplex structure. One strand of the dsRNA (the antisense strand) includes a region of complementarity that is substantially complementary, and generally fully complementary, to a target sequence derived from the sequence of an mRNA formed during the expression of a gene from the JC Virus. The other strand of the dsRNA (the sense strand) includes a region that is complementary to the antisense strand, such that the two strands hybridize and form a duplex structure when combined under suitable conditions. Generally, the duplex structure is between 15 and 30, more generally between 18 and 25, yet more generally between 19 and 24, and most generally between 19 and 21 base pairs in length. Similarly, the region of complementarity to the target sequence is between 15 and 30, more generally between 18 and 25, yet more generally between 19 and 24, and most generally between 19 and 21 nucleotides in length. In some embodiments, the dsRNA is between 10 and 15 nucleotides in length, and in other embodiments, the dsRNA is between 25 and 30 nucleotides in length. The dsRNA featured in the invention may further include one or more single-stranded nucleotide overhangs.

[0078] The dsRNA can be synthesized by standard methods known in the art as further discussed below, e.g., by use of an automated DNA synthesizer, such as are commercially available from, for example, Biosearch, Applied Biosystems, Inc. In one embodiment, a gene from the JC Virus is the human JC virus genome. In specific embodiments, the sense strand of the dsRNA includes a sequence selected from the sense sequences of Tables 8, 10, and 13-16, and the antisense strand of the dsRNA includes a sequence selected from the antisense sequences of Tables 8, 10, and 13-16. Alternative antisense sequences that target elsewhere in the target sequence provided in Tables 8, 10, and 13-16 can readily be determined using the target sequence and the flanking JC virus sequence.

[0079] In further embodiments, the dsRNA includes at least one nucleotide sequence selected from the sequences provided in Tables 8, 10, and 13-16. In other embodiments, the dsRNA includes at least two sequences selected from this group, where one of the at least two sequences is complementary to another of the at least two sequences, and one of the at least two sequences is substantially complementary to a sequence of an mRNA generated in the expression of a gene from the JC Virus. Generally, the dsRNA includes two oligonucleotides, where one oligonucleotide is described as a sense strand selected from the sense strands of Tables 8, 10, and 13-16, a second oligonucleotide is described as an antisense strand selected from the antisense strands of Tables 8, 10, and 13-16.

[0080] The skilled person is well aware that dsRNAs having a duplex structure of between 20 and 23, but specifically 21, base pairs have been hailed as particularly effective in inducing RNA interference (Elbashir et al., EMBO 2001, 20:6877-6888). However, others have found that shorter or longer dsRNAs can be effective as well. In the embodiments described above, by virtue of the nature of the oligonucleotide sequences provided in Tables 8, 10, and 13-16, the dsRNAs featured in the invention can include at least one strand of a length of minimally 21 nt. It can be reasonably expected that shorter dsRNAs having one of the sequences of Tables 8, 10, and 13-16 minus only a few nucleotides on one or both ends may be similarly effective as compared to the dsRNAs described above. Hence, dsRNAs having a partial sequence of at least 15, 16, 17, 18, 19, 20, or more contiguous nucleotides from one of the sequences of Tables 8, 10, and 13-16, and differing in their ability to inhibit the expression of a gene from the JC Virus in a FACS assay as described herein by not more than 5, 10, 15, 20, 25, or 30% inhibition from a dsRNA having the full sequence, are contemplated by the invention. Further, dsRNAs that cleave within the target sequence of a dsRNA provided in Tables 8, 10, or 13-16 can readily be made using the JC virus sequence and the target sequence provided.

[0081] In addition, the RNAi agents provided in Tables 8, 10, and 13-16 identify a site in the JC virus mRNA that is susceptible to RNAi based cleavage. As such the present invention further includes RNAi agents that target within the sequence targeted by one of the agents of the present invention. As used herein a second RNAi agent is said to target within the sequence of a first RNAi agent if the second RNAi agent cleaves the message anywhere within the mRNA that is complementary to the antisense strand of the first RNAi agent. Such a second agent will generally consist of at least 15 contiguous nucleotides from one of the sequences provided in Tables 8, 10, and 13-16 coupled to additional nucleotide sequences taken from the region contiguous to the selected sequence in a gene from the JC Virus. For example, the last 15 nucleotides of SEQ ID NO:1 combined with the next 6 nucleotides from the target JC virus genome produces a single strand agent of 21 nucleotides that is based on one of the sequences provided in Tables 8, 10, and 13-16.

[0082] A dsRNA targeting a gene of the JC virus can contain one or more mismatches to the target sequence. In one embodiment, the dsRNA contains no more than 3 mismatches. If the antisense strand of the dsRNA contains mismatches to a target sequence, it is preferable that the area of mismatch not be located in the center of the region of complementarity. If the antisense strand of the dsRNA contains mismatches to the target sequence, it is preferable that the mismatch be restricted to 5 nucleotides from either end, for example 5, 4, 3, 2, or 1 nucleotide from either the 5′ or 3′ end of the region of complementarity. For example, for a 23 nucleotide dsRNA strand which is complementary to a region of a gene from the JC Virus, the dsRNA generally does not contain any mismatch within the central 13 nucleotides. The methods described herein can be used to determine whether a dsRNA containing a mismatch to a target sequence is effective in inhibiting the expression of a gene from the JC Virus. Consideration of the efficacy of dsRNAs with mismatches in inhibiting expression of a gene from the JC Virus is important, especially if the particular region of complementarity in a gene from the JC Virus is known to have polymorphic sequence variation within the population.

[0083] In one embodiment, at least one end of the dsRNA has a single-stranded nucleotide overhang of 1 to 4, generally 1 or 2 nucleotides. dsRNAs having at least one nucleotide overhang have unexpectedly superior inhibitory properties than their blunt-ended counterparts. Moreover, the present inventors have discovered that the presence of only one nucleotide overhang strengthens the interference activity of the dsRNA, without affecting its overall stability. dsRNA having only one overhang has proven particularly stable and effective in vivo, as well as in a variety of cells, cell culture mediums, blood, and serum. Generally, the single-stranded overhang is located at the 3′-terminal end of the antisense strand or, alternatively, at the 3′-terminal end of the sense strand. The dsRNA may also have a blunt end, generally located at the 5′-end of the antisense strand. Such dsRNAs have improved stability and inhibitory activity, thus allowing administration at low dosages, i.e., less than 5 mg/kg body weight of the recipient per day. In one embodiment, the antisense strand of the dsRNA has 1-10 nucleotides overhangs each at the 3′ end and the 5′ end over the sense strand. In one embodiment, the sense strand of the dsRNA has 1-10 nucleotides overhangs each at the 3′ end and the 5′ end over the antisense strand. In another embodiment, one or more of the nucleotides in the overhang is replaced with a nucleoside thiophosphate.

[0084] In yet another embodiment, the dsRNA is chemically modified to enhance stability. The nucleic acids featured in the invention may be synthesized and/or modified by methods well established in the art, such as those described in “Current protocols in nucleic acid chemistry,” Beaucage, S. L. et al. (Edrs.), John Wiley & Sons, Inc., New York, N.Y., USA, which is hereby incorporated herein by reference. Specific examples of dsRNA compounds useful in this invention include dsRNAs containing modified backbones or no natural internucleoside linkages. As defined in this specification, dsRNAs having modified backbones include those that retain a phosphorus atom in the backbone and those that do not have a phosphorus atom in the backbone. For the purposes of this specification, and as sometimes referenced in the art, modified dsRNAs that do not have a phosphorus atom in their internucleoside backbone can also be considered to be oligonucleosides.

[0085] Typical modified dsRNA backbones include, for example, phosphorothioates, chiral phosphorothioates, phosphorodithioates, phosphotriesters, aminoalkylphosphotriesters, methyl and other alkyl phosphonates including 3′-alkylene phosphonates and chiral phosphonates, phosphinates, phosphoramidates including 3′-amino phosphoramidate and aminoalkylphosphoramidates, thionophosphoramidates, thionoalkylphosphonates, thionoalkylphosphotriesters, and boranophosphates having normal 3′-5′ linkages, 2′-5′ linked analogs of these, and those) having inverted polarity wherein the adjacent pairs of nucleoside units are linked 3′-5′ to 5′-3′ or 2′-5′ to 5′-2′. Various salts, mixed salts and free acid forms are also included.

[0086] Representative U.S. patents that teach the preparation of the above phosphorus-containing linkages include, but are not limited to, U.S. Pat. Nos. 3,687,808; 4,469,863; 4,476,301; 5,023,243; 5,177,195; 5,188,897; 5,264,423; 5,276,019; 5,278,302; 5,286,717; 5,321,131; 5,399,676; 5,405,939; 5,453,496; 5,455,233; 5,466,677; 5,476,925; 5,519,126; 5,536,821; 5,541,316; 5,550,111; 5,563,253; 5,571,799; 5,587,361; and 5,625,050, each of which is herein incorporated by reference

[0087] Typical modified dsRNA backbones that do not include a phosphorus atom therein have backbones that are formed by short chain alkyl or cycloalkyl internucleoside linkages, mixed heteroatoms and alkyl or cycloalkyl internucleoside linkages, or ore or more short chain heteroatomic or heterocyclic internucleoside linkages. These include those having morpholino linkages (formed in part from the sugar portion of a nucleoside); siloxane backbones; sulfide, sulfoxide and sulfone backbones; formacetyl and thioformacetyl backbones; methylene formacetyl and thioformacetyl backbones; alkene containing backbones; sulfamate backbones; methyleneimino and methylenehydrazino backbones; sulfonate and sulfonamide backbones; amide backbones; and others having mixed N, O, S and CH2 component parts.

[0088] Representative U.S. patents that teach the preparation of the above oligonucleosides include, but are not limited to, U.S. Pat. Nos. 5,034,506; 5,166,315; 5,185,444; 5,214,134; 5,216,141; 5,235,033; 5,64,562; 5,264,564; 5,405,938; 5,434,257; 5,466,677; 5,470,967; 5,489,677; 5,541,307; 5,561,225; 5,596,086; 5,602,240; 5,608,046; 5,610,289; 5,618,704; 5,623,070; 5,663,312; 5,633,360; 5,677,437; and, 5,677,439, each of which is herein incorporated by reference.

[0089] In other typical dsRNA mimetics, both the sugar and the internucleoside linkage, i.e., the backbone, of the nucleotide units are replaced with novel groups. The base units are maintained for hybridization with an appropriate nucleic acid target compound. One such oligomeric compound, an dsRNA mimetic that has been shown to have excellent hybridization properties, is referred to as a peptide nucleic acid (PNA). In PNA compounds, the sugar backbone of an dsRNA is replaced with an amide containing backbone, in particular an aminoethylglycine backbone. The nucleobases are retained and are bound directly or indirectly to aza nitrogen atoms of the amide portion of the backbone. Representative U.S. patents that teach the preparation of PNA compounds include, but are not limited to, U.S. Pat. Nos. 5,539,082; 5,714,331; and 5,719,262, each of which is herein incorporated by reference. Further teaching of PNA compounds can be found in Nielsen et al., Science, 1991, 254, 1497-1500.

[0090] Most embodiments featured in the invention include dsRNAs with phosphorothioate backbones and oligonucleosides with heteroatom backbones, and in particular —CH₂—NH—CH₂—, —CH₂—N(CH₃)—O—CH₂— [known as a methylene (methylimino) or MMI backbone], —CH₂—O—N(CH₃)—CH₂—, —CH₂—N(CH₃)—N(CH₃)—CH₂— and —N(CH₃)—CH₂—CH₂— [wherein the native phosphodiester backbone is represented as —O—P—O—CH₂—] of the above-referenced U.S. Pat. No. 5,489,677, and the amide backbones of the above-referenced U.S. Pat. No. 5,602,240. Also included are dsRNAs having morpholino backbone structures of the above-referenced U.S. Pat. No. 5,034,506.

[0091] Modified dsRNAs may also contain one or more substituted sugar moieties. Typical dsRNAs include one of the following at the 2′ position: OH; F; O—, S—, or N-alkyl; O—, S—, or N-alkenyl; O—, S- or N-alkynyl; or O-alkyl-O-alkyl, wherein the alkyl, alkenyl and alkynyl may be substituted or unsubstituted C₁ to C₁₀ alkyl or C₂ to C₁₀ alkenyl and alkynyl. Typical embodiments include O[(CH₂)ₙO]ₘCH₃, O(CH₂)ₙOCH₃, O(CH₂)ₙNH₂, O(CH₂)CH₃, O(CH₂)ₙONH₂, and O(CH₂)ₙON[(CH₂)ₙCH₃)]₂, where n and m are from 1 to about 10. Other typical dsRNAs include one of the following at the 2′ position: C₁ to C₁₀ lower alkyl, substituted lower alkyl, alkaryl, aralkyl, O-alkaryl or O-aralkyl, SH, SCH₃, OCN, Cl, Br, CN, CF₃, OCF₃, SOCH₃, SO₂CH₃, ONO₂, NO₂, N₃, NH₂, heterocycloalkyl, heterocycloalkaryl, aminoalkylamino, polyalkylamino, substituted silyl, an RNA cleaving group, a reporter group, an intercalator, a group for improving the pharmacokinetic properties of an dsRNA, or a group for improving the pharmacodynamic properties of an dsRNA, and other substituents having similar properties. One typical modification includes 2′-methoxyethoxy (2′-O—CH₂CH₂OCH₃, also known as 2′-O-(2-methoxyethyl) or 2′-MOE) (Martin et al., Helv. Chim. Acta, 1995, 78, 486-504) i.e., an alkoxy-alkoxy group. Another typical modification includes 2′-dimethylaminooxyethoxy, i.e., a O(CH₂)₂ON(CH₃)₂ group, also known as 2′-DMAOE, as described in examples hereinbelow, and 2′-dimethylaminoethoxyethoxy (also known in the art as 2′-O-dimethylaminoethoxyethyl or 2′-DMAEOE), i.e., 2′-O—CH₂—O—CH₂—N(CH₃)₂, also described in examples hereinbelow.

[0092] Other modifications include 2′-methoxy (2′-OCH₃), 2′-aminopropoxy (2′-OCH₂CH₂CH₂NH₂) and 2′-fluoro (2′-F). Similar modifications may also be made at other positions on the dsRNA, particularly the 3′ position of the sugar on the 3′ terminal nucleotide or in 2′-5′ linked dsRNAs and the 5′ position of 5′ terminal nucleotide. DsRNAs may also have sugar mimetics such as cyclobutyl moieties in place of the pentofuranosyl sugar. Representative U.S. patents that teach the preparation of such modified sugar structures include, but are not limited to, U.S. Pat. Nos. 4,981,957; 5,118,800; 5,319,080; 5,359,044; 5,393,878; 5,446,137; 5,466,786; 5,514,785; 5,519,134; 5,567,811; 5,576,427; 5,591,722; 5,597,909; 5,610,300; 5,627,053; 5,639,873; 5,646,265; 5,658,873; 5,670,633; and 5,700,920, certain of which are commonly owned with the instant application, and each of which is herein incorporated by reference in its entirety.

[0093] dsRNAs may also include nucleobase (often referred to in the art simply as “base”) modifications or substitutions. As used herein, “unmodified” or “natural” nucleobases include the purine bases adenine (A) and guanine (G), and the pyrimidine bases thymine (T), cytosine (C) and uracil (U). Modified nucleobases include other synthetic and natural nucleobases such as 5-methylcytosine (5-me-C), 5-hydroxymethyl cytosine, xanthine, hypoxanthine, 2-aminoadenine, 6-methyl and other alkyl derivatives of adenine and guanine, 2-propyl and other alkyl derivatives of adenine and guanine, 2-thiouracil, 2-thiothymine and 2-thiocytosine, 5-halouracil and cytosine, 5-propynyl uracil and cytosine, 6-azo uracil, cytosine and thymine, 5-uracil (pseudouracil), 4-thiouracil, 8-halo, 8-amino, 8-thiol, 8-thioalkyl, 8-hydroxyl anal other 8-substituted adenines and guanines, 5-halo, particularly 5-bromo, 5-trifluoromethyl and other 5-substituted uracils and cytosines, 7-methylguanine and 7-methyladenine, 8-azaguanine and 8-azaadenine, 7-deazaguanine and 7-daazaadenine and 3-deazaguanine and 3-deazaadenine. Further nucleobases include those disclosed in U.S. Pat. No. 3,687,808, those disclosed in The Concise Encyclopedia Of Polymer Science And Engineering, pages 858-859, Kroschwitz, J. L, ed. John Wiley & Sons, 1990, these disclosed by Englisch et al., Angewandte Chemie, International Edition, 1991, 30, 613, and those disclosed by Sanghvi, Y S., Chapter 15, DsRNA Research and Applications, pages 289-302, Crooke, S. T. and Lebleu, B., Ed., CRC Press, 1993. Certain of these nucleobases are particularly useful for increasing the binding affinity of the oligomeric compounds featured in the invention. These include 5-substituted pyrimidines, 6-azapyrimidines and N-2, N-6 and 0-6 substituted purines, including 2-aminopropyladenine, 5-propynyluracil and 5-propynylcytosine. 5-methylcytosine substitutions have been shown to increase nucleic acid duplex stability by 0.6-1.2° C. (Sanghvi, Y. S., Crooke, S. T. and Lebleu, B., Eds., DsRNA Research and Applications, CRC Press, Boca Raton, 1993, pp. 276-278) and represent typical base substitutions, particularly when combined with 2′-O-methoxyethyl sugar modifications.

[0094] Representative U.S. patents that teach the preparation of certain of the above noted modified nucleobases as well as other modified nucleobases include, but are not limited to, the above noted U.S. Pat. No. 3,687,808, as well as U.S. Pat. Nos. 4,845,205; 5,130,30; 5,134,066; 5,175,273; 5,367,066; 5,432,272; 5,457,187; 5,459,255; 5,484,908; 5,502,177; 5,525,711; 5,552,540; 5,587,469; 5,594,121, 5,596,091; 5,614,617; and 5,681,941, each of which is herein incorporated by reference, and U.S. Pat. No. 5,750,692, also herein incorporated by reference.

[0095] Another modification of the dsRNAs featured in the invention involve chemically linking to the dsRNA one or more moieties or conjugates which enhance the activity, cellular distribution or cellular uptake of the dsRNA. Such moieties include but are not limited to lipid moieties such as a cholesterol moiety (Letsinger et al., Proc. Natl. Acid. Sci. USA, 199, 86, 6553-6556), cholic acid (Manoharan et al., Biorg. Med. Chem. Let., 1994 4 1053-1060), a thioether, e.g., beryl-5-tritylthiol (Manoharan et al., Ann. N.Y. Acad. Sci., 1992, 660, 306-309; Manoharan et al., Biorg. Med. Chem. Let., 1993, 3, 2765-2770), a thiocholesterol (Oberhauser et al., Nucl. Acids Res., 1992, 20, 533-538), an aliphatic chain, e.g., dodecandiol or undecyl residues (Saison-Behmoaras et al., EMBO J, 1991, 10, 1111-1118; Kabanov et al., FEBS Lett., 1990, 259, 327-330; Svinarchuk et al., Biochimie, 1993, 75, 49-54), a phospholipid, e.g., di-hexadecyl-rac-glycerol or triethyl-ammonium 1,2-di-O-hexadecyl-rac-glycero-3-Hphosphonate (Manoharan et al., Tetrahedron Lett., 1995, 36, 3651-3654; Shea et al., Nucl. Acids Res., 1990, 18, 3777-3783), a polyamine or a polyethylene glycol chain (Manoharan et al., Nucleosides & Nucleotides, 1995, 14, 969-973), or adamantane acetic acid (Manoharan et al., Tetrahedron Lett., 1995, 36, 3651-3654), a palmityl moiety (Mishra et al., Biochim. Biophys. Acta, 1995, 1264, 229-237), or an octadecylamine or hexylamino-carbonyloxycholesterol moiety (Crooke et al., J. Pharmacol. Exp. Ther., 1996, 277, 923-937).

[0096] Representative U.S. patents that teach the preparation of such dsRNA conjugates include, but are not limited to, U.S. Pat. Nos. 4,828,979; 4,948,882; 5,218,105; 5,525,465; 5,541,313; 5,545,730; 5,552,538; 5,578,717, 5,580,731; 5,591,584; 5,109,124; 5,118,802; 5,138,045; 5,414,077; 5,486,603; 5,512,439; 5,578,718; 5,608,046; 4,587,044; 4,605,735; 4,667,025; 4,762,779; 4,789,737; 4,824,941; 4,835,263; 4,876,335; 4,904,582; 4,958,013; 5,082,830; 5,112,963; 5,214,136; 5,082,830; 5,112,963; 5,214,136; 5,245,022; 5,254,469; 5,258,506; 5,262,536; 5,272,250; 5,292,873; 5,317,098; 5,371,241, 5,391,723; 5,416,203, 5,451,463; 5,510,475; 5,512,667; 5,514,785; 5,565,552; 5,567,810; 5,574,142; 5,585,481; 5,587,371; 5,595,726; 5,597,696; 5,599,923; 5,599,928 and 5,688,941, each of which is herein incorporated by reference.

[0097] It is not necessary for all positions in a given compound to be uniformly modified, and in fact more than one of the aforementioned modifications may be incorporated in a single compound or even at a single nucleoside within an dsRNA. The present invention also includes dsRNA compounds which are chimeric compounds. “Chimeric” dsRNA compounds or “chimeras,” in the context of this invention, are dsRNA compounds, particularly dsRNAs, which contain two or more chemically distinct regions, each made up of at least one monomer unit, i.e., a nucleotide in the case of an dsRNA compound. These dsRNAs typically contain at least one region wherein the dsRNA is modified so as to confer upon the dsRNA increased resistance to nuclease degradation, increased cellular uptake, and/or increased binding affinity for the target nucleic acid. An additional region of the dsRNA may serve as a substrate for enzymes capable of cleaving RNA:DNA or RNA:RNA hybrids. By way of example, RNase H is a cellular endonuclease which cleaves the RNA strand of an RNA:DNA duplex. Activation of RNase H, therefore, results in cleavage of the RNA target, thereby greatly enhancing the efficiency of dsRNA inhibition of gene expression. Consequently, comparable results can often be obtained with shorter dsRNAs when chimeric dsRNAs are used, compared to phosphorothioate deoxydsRNAs hybridizing to the same target region. Cleavage of the RNA target can be routinely detected by gel electrophoresis and, if necessary, associated nucleic acid hybridization techniques known in the art.

[0098] In certain instances, the dsRNA may be modified by a non-ligand group. A number of non-ligand molecules have been conjugated to dsRNAs in order to enhance the activity, cellular distribution or cellular uptake of the dsRNA, and procedures for performing such conjugations are available in the scientific literature. Such non-ligand moieties have included lipid moieties, such as cholesterol (Letsinger et al., Proc. Natl. Acad. Sci. USA, 1989, 86:6553), cholic acid (Manoharan et al., Bioorg. Med. Chem. Lett., 1994, 4:1053), a thioether, e.g., hexyl-5-tritylthiol (Manoharan et al., Ann N.Y. Acad. Sci., 1992, 660:306; Manoharan et al., Bioorg. Med. Chem. Let., 1993, 3:2765), a thiocholesterol (Oberhauser et al., Nucl. Acids Res., 1992, 20:533), an aliphatic chain, e.g., dodecandiol or undecyl residues (Saison-Behmoaras et al., EMBO J., 1991, 10:111; Kabanov et al., FEBS Lett., 1990, 259:327; Svinarchuk et al., Biochimie, 1993, 75:49), a phospholipid, e.g., di-hexadecyl-rac-glycerol or triethylammonium 1,2-di-O-hexadecyl-rac-glycero-3-H-phosphonate (Manoharan et al., Tetrahedron Lett., 1995, 36:3651; Shea et al., Nucl. Acids Res., 1990, 18:3777), a polyamine or a polyethylene glycol chain (Manoharan et al., Nucleosides & Nucleotides, 1995, 14:969), or adamantane acetic acid (Manoharan et al., Tetrahedron Lett., 1995, 36:3651), a palmityl moiety (Mishra et al., Biochim. Biophys. Acta, 1995, 1264:229), or an octadecylamine or hexylamino-carbonyl-oxycholesterol moiety (Crooke et al., J. Pharmacol. Exp. Ther., 1996, 277:923). Representative United States patents that teach the preparation of such dsRNA conjugates have been listed above. Typical conjugation protocols involve the synthesis of dsRNAs bearing an aminolinker at one or more positions of the sequence. The amino group is then reacted with the molecule being conjugated using appropriate coupling or activating reagents. The conjugation reaction may be performed either with the dsRNA still bound to the solid support or following cleavage of the dsRNA in solution phase. Purification of the dsRNA conjugate by HPLC typically affords the pure conjugate.

[0099] Vector Encoded RNAi Agents

[0100] In another aspect, JC virus specific dsRNA molecules that modulate JC virus genome expression activity are expressed from transcription units inserted into DNA or RNA vectors (see, e.g., Couture, A, et al., TIG. (1996), 12:5-10; Skillern, A., et al., International PCT Publication No. WO 00/22113, Conrad, International PCT Publication No. WO 00/22114, and Conrad, U.S. Pat. No. 6,054,299). These transgenes can be introduced as a linear construct, a circular plasmid, or a viral vector, which can be incorporated and inherited as a transgene integrated into the host genome. The transgene can also be constructed to permit it to be inherited as an extrachromosomal plasmid (Gassmann, et al., Proc. Natl. Acad. Sci. USA (1995) 92:1292).

[0101] The individual strands of a dsRNA can be transcribed by promoters on two separate expression vectors and co-transfected into a target cell. Alternatively each individual strand of the dsRNA can be transcribed by promoters both of which are located on the same expression plasmid. In one embodiment, a dsRNA is expressed as an inverted repeat joined by a linker polynucleotide sequence such that the dsRNA has a stem and loop structure.

[0102] The recombinant dsRNA expression vectors are generally DNA plasmids or viral vectors. dsRNA expressing viral vectors can be constructed based on, but not limited to, adeno-associated virus (for a review, see Muzyczka, et al., Curr. Topics Micro. Immunol. (1992) 158:97-129)); adenovirus (see, for example, Berkner, et al., BioTechniques (1998) 6:616), Rosenfeld et al. (1991, Science 252:431-434), and Rosenfeld et al. (1992), Cell 68:143-155)); or alphavirus as well as others known in the art. Retroviruses have been used to introduce a variety of genes into many different cell types, including epithelial cells, in vitro and/or in vivo (see, e.g., Eglitis, et al., Science (1985) 230:1395-1398; Danos and Mulligan, Proc. NatI. Acad. Sci. USA (1998) 85:6460-6464; Wilson et al., 1988, Proc. NatI. Acad. Sci. USA 85:3014-3018; Armentano et al., 1990, Proc. NatI. Acad. Sci. USA 87:61416145; Huber et al., 1991, Proc. NatI. Acad. Sci. USA 88:8039-8043; Ferry et al., 1991, Proc. NatI. Acad. Sci. USA 88:8377-8381; Chowdhury et al., 1991, Science 254:1802-1805; van Beusechem. et al., 1992, Proc. Nad. Acad. Sci. USA 89:7640-19; Kay et al., 1992, Human Gene Therapy 3:641-647; Dai et al., 1992, Proc. Natl. Acad. Sci. USA 89:10892-10895; Hwu et al., 1993, J. Immunol. 150:4104-4115; U.S. Pat. No. 4,868,116; U.S. Pat. No. 4,980,286; PCT Application WO 89/07136; PCT Application WO 89/02468; PCT Application WO 89/05345; and PCT Application WO 92/07573). Recombinant retroviral vectors capable of transducing and expressing genes inserted into the genome of a cell can be produced by transfecting the recombinant retroviral genome into suitable packaging cell lines such as PA317 and Psi-CRIP (Comette et al., 1991, Human Gene Therapy 2:5-10; Cone et al., 1984, Proc. Natl. Acad. Sci. USA 81:6349). Recombinant adenoviral vectors can be used to infect a wide variety of cells and tissues in susceptible hosts (e.g., rat, hamster, dog, and chimpanzee) (Hsu et al., 1992, J. Infectious Disease, 166:769), and also have the advantage of not requiring mitotically active cells for infection.

[0103] Any viral vector capable of accepting the coding sequences for the dsRNA molecule(s) to be expressed can be used, for example vectors derived from adenovirus (AV); adeno-associated virus (AAV); retroviruses (e.g, lentiviruses (LV), Rhabdoviruses, murine leukemia virus); herpes virus, and the like. The tropism of viral vectors can be modified by pseudotyping the vectors with envelope proteins or other surface antigens from other viruses, or by substituting different viral capsid proteins, as appropriate.

[0104] For example, lentiviral vectors can be pseudotyped with surface proteins from vesicular stomatitis virus (VSV), rabies, Ebola, Mokola, and the like. AAV vectors can be made to target different cells by engineering the vectors to express different capsid protein serotypes. For example, an AAV vector expressing a serotype 2 capsid on a serotype 2 genome is called AAV 2/2. This serotype 2 capsid gene in the AAV 2/2 vector can be replaced by a serotype 5 capsid gene to produce an AAV 2/5 vector. Techniques for constructing AAV vectors which express different capsid protein serotypes are within the skill in the art; see, e.g., Rabinowitz J E et al. (2002), J Virol 76:791-801, the entire disclosure of which is herein incorporated by reference.

[0105] Selection of recombinant viral vectors suitable for use in the invention, methods for inserting nucleic acid sequences for expressing the dsRNA into the vector, and methods of delivering the viral vector to the cells of interest are within the skill in the art. See, for example, Dornburg R (1995), Gene Therap. 2: 301-310; Eglitis M A (1988), Biotechniques 6: 608-614; Miller A D (1990), Hum Gene Therap. 1: 5-14; Anderson W F (1998), Nature 392: 25-30; and Rubinson D A et al., Nat. Genet. 33: 401-406, the entire disclosures of which are herein incorporated by reference.

[0106] Typical viral vectors are those derived from AV and AAV. In one embodiment, a dsRNA featured in the invention is expressed as two separate, complementary single-stranded RNA molecules from a recombinant AAV vector comprising, for example, either the U6 or H1 RNA promoters, or the cytomegalovirus (CMV) promoter.

[0107] A suitable AV vector for expressing a dsRNA, a method for constructing the recombinant AV vector, and a method for delivering the vector into target cells, are described in Xia H et al. (2002), Nat. Biotech. 20: 1006-1010.

[0108] Suitable AAV vectors for expressing the dsRNA, methods for constructing the recombinant AV vector, and methods for delivering the vectors into target cells are described in Samulski R et al. (1987), J. Virol. 61: 3096-3101; Fisher K J et al. (1996), J. Virol, 70: 520-532; Samulski R et al. (1989), J. Virol. 63: 3822-3826; U.S. Pat. No. 5,252,479; U.S. Pat. No. 5,139,941; International Patent Application No. WO 94/13788; and International Patent Application No. WO 93/24641, the entire disclosures of which are herein incorporated by reference.

[0109] The promoter driving dsRNA expression in either a DNA plasmid or viral vector may be a eukaryotic RNA polymerase I (e.g. ribosomal RNA promoter), RNA polymerase II (e.g. CMV early promoter or actin promoter or U1 snRNA promoter) or generally RNA polymerase III promoter (e.g. U6 snRNA or 7SK RNA promoter) or a prokaryotic promoter, for example the T7 promoter, provided the expression plasmid also encodes T7 RNA polymerase required for transcription from a T7 promoter. The promoter can also direct transgene expression to the pancreas (see, e.g. the insulin regulatory sequence for pancreas (Bucchini et al., 1986, Proc. Natl. Acad. Sci. USA 83:2511-2515)).

[0110] In addition, expression of the transgene can be precisely regulated, for example, by using an inducible regulatory sequence and expression systems such as a regulatory sequence that is sensitive to certain physiological regulators, e.g., circulating glucose levels, or hormones (Docherty et al., 1994, FASEB J. 8:20-24). Such inducible expression systems, suitable for the control of transgene expression in cells or in mammals include regulation by ecdysone, by estrogen, progesterone, tetracycline, chemical inducers of dimerization, and isopropyl-beta-D1-thiogalactopyranoside (EPTG). A person skilled in the art would be able to choose the appropriate regulatory/promoter sequence based on the intended use of the dsRNA transgene.

[0111] Generally, recombinant vectors capable of expressing dsRNA molecules are delivered as described below and persist in target cells. Alternatively, viral vectors can be used that provide for transient expression of dsRNA molecules. Such vectors can be repeatedly administered as necessary. Once expressed, the dsRNAs bind to target RNA and modulate its function or expression. Delivery of dsRNA expressing vectors can be systemic, such as by intravenous or intramuscular administration, by administration to target cells ex-planted from the patient followed by reintroduction into the patient, or by any other means that allows for introduction into a desired target cell.

[0112] dsRNA expression DNA plasmids are typically transfected into target cells as a complex with cationic lipid carriers (e.g. Oligofectamine) or non-cationic lipid-based carriers (e.g. Transit-TKO™). Multiple lipid transfections for dsRNA-mediated knockdowns targeting different regions of a single JC virus genome or multiple JC virus genomes over a period of a week or more are also contemplated by the invention. Successful introduction of vectors into host cells can be monitored using various known methods. For example, transient transfection can be monitored using a reporter, such as a fluorescent marker, such as Green Fluorescent Protein (GFP). Stable transfection of ex vivo cells can be ensured using markers that provide the transfected cell with resistance to specific environmental factors (e.g., antibiotics and drugs), such as hygromycin B resistance.

[0113] The JC virus specific dsRNA molecules can also be inserted into vectors and used as gene therapy vectors for human patients. Gene therapy vectors can be delivered to a subject by, for example, intravenous injection, local administration (see U.S. Pat. No. 5,328,470) or by stereotactic injection (see e.g., Chen et al. (1994) Proc. Natl. Acad. Sci. USA 91:3054-3057). The pharmaceutical preparation of the gene therapy vector can include the gene therapy vector in an acceptable diluent, or can comprise a slow release matrix in which the gene delivery vehicle is imbedded. Alternatively, where the complete gene delivery vector can be produced intact from recombinant cells, e.g., retroviral vectors, the pharmaceutical preparation can include one or more cells which produce the gene delivery system.

### III. PHARMACEUTICAL COMPOSITIONS COMPRISING dsRNA

[0114] In one embodiment, the invention provides pharmaceutical compositions suitable for localized delivery to oligodendrocytes, such as oligodendrocytes of the corpus callosum. Such compositions include a dsRNA as described herein and a pharmaceutically acceptable carrier. The pharmaceutical composition having the dsRNA is useful for treating a disease or disorder associated with the expression or activity of a gene from the JC Virus and/or viral infection, such as PML. Such pharmaceutical compositions are formulated based on the mode of delivery. One example is a composition formulated for infusion directly into the corpus callosum.

[0115] Pharmaceutical compositions featured herein can be used for infusion into other areas of white matter, or into the striatum of the brain. Intrastriatal infusion is particularly relevant for treatment of neurological disorders such as Huntington's disease.

[0116] The pharmaceutical compositions featured herein are administered in dosages sufficient to inhibit expression of a gene from the JC Virus. In general, a suitable dose of dsRNA will be in the range of 0.01 to 200.0 milligrams per kilogram body weight of the recipient per day, generally in the range of 0.02 to 50 mg per kilogram body weight per day. For example, the dsRNA can be administered at 0.01 mg/kg, 0.1 mg/kg, 0.05 mg/kg, 0.5 mg/kg, 1 mg/kg, 2 mg/kg, 3 mg/kg, 10 mg/kg, 20 mg/kg, 30 mg/kg, 40 mg/kg, or 50 mg/kg per single dose. The pharmaceutical composition may be administered once daily, or the dsRNA may be administered as two, three, or more sub-doses at appropriate intervals throughout the day or even using continuous infusion or delivery through a controlled release formulation. In that case, the dsRNA contained in each sub-dose must be correspondingly smaller in order to achieve the total daily dosage. The dosage unit can also be compounded for delivery over several days, e.g., using a conventional sustained release formulation which provides sustained release of the dsRNA over a several day period. In this embodiment, the dosage unit contains a corresponding multiple of the daily dose. In some embodiments, the dsRNA is administered daily, weekly, biweekly, or monthly.

[0117] In one embodiment, the dsRNA composition is infused directly into the corpus callosum for 1, 2, 3, 5, or 7 days or more. Methods of intracranial infusion are known in the art and can include, for example, use of an osmotic pump.

[0118] The present invention includes pharmaceutical compositions that can be delivered by injection directly into the brain. The injection can be by stereotactic injection into a particular region of the brain (e.g., white matter such as the corona radiata, or the substantia nigra, cortex, hippocampus, striatum, or globus pallidus), or the dsRNA can be delivered into multiple regions of the central nervous system (e.g., into multiple regions of the brain, and/or into the spinal cord). The dsRNA can also be delivered into diffuse regions of the brain (e.g., diffuse delivery to the cortex of the brain).

[0119] In one embodiment, a dsRNA targeting a gene expressed in the brain can be delivered by way of a cannula or other delivery device having one end implanted in the brain, e.g., white matter such as the corona radiata, or the substantia nigra, cortex, hippocampus, striatum, corpus callosum or globus pallidus of the brain. The cannula can be connected to a reservoir of the dsRNA composition. The flow or delivery can be mediated by a pump. In one embodiment, a pump and reservoir are implanted in an area distant from the tissue, e.g., in the abdomen, and delivery is effected by a conduit leading from the pump or reservoir to the site of release. Infusion of the dsRNA composition into the brain can be over several hours or for several days, e.g., for 1, 2, 3, 5, or 7 days or more. Devices for delivery to the brain are described, for example, in U.S. Pat. Nos. 6,093,180, and 5,814,014. In another embodiment, the pump is externalized (not implanted). Infusion of the dsRNA composition into the brain can be over several hours or for several days up to approximately 7 days, e.g., for 1, 2, 3, 5, or 7 days.

[0120] The skilled artisan will appreciate that certain factors may influence the dosage and timing required to effectively treat a subject, including but not limited to the severity of the disease or disorder, previous treatments, the general health and/or age of the subject, and other diseases present. Moreover, treatment of a subject with a therapeutically effective amount of a composition can include a single treatment or series of treatments. Estimates of effective dosages and in vivo half-lives for individual dsRNAs can be made using conventional methodologies or determined on the basis of in vivo testing using an appropriate animal model, as described elsewhere herein.

[0121] Advances in mouse genetics have generated a number of mouse models for the study of various human diseases, such as pathological processes mediated by JC virus expression. Such models are used for in vivo testing of dsRNA, as well as for determining a therapeutically effective dose.

[0122] The present invention also includes methods of administering pharmaceutical compositions and formulations which include dsRNA compounds, such as those that target an RNA expressed by a pathogen, such as the JC virus.

[0123] Compositions and formulations for oral administration include powders or granules, microparticulates, nanoparticulates, suspensions or solutions in water or non-aqueous media. Thickeners, diluents, emulsifiers, dispersing aids or binders may be desirable.

[0124] Compositions and formulations for intracranial, parenteral, intrathecal or intraventricular administration may include sterile aqueous solutions which may also contain buffers, diluents and other suitable additives such as, but not limited to, penetration enhancers, carrier compounds and other pharmaceutically acceptable carriers or excipients.

[0125] Pharmaceutical compositions for use with methods featured in the present invention include, but are not limited to, solutions, emulsions, and liposome-containing formulations. These compositions may be generated from a variety of components that include, but are not limited to, preformed liquids, self-emulsifying solids and self-emulsifying semisolids.

[0126] The pharmaceutical formulations for use with the methods of the present invention, which may conveniently be presented in unit dosage form, may be prepared according to conventional techniques well known in the pharmaceutical industry. Such techniques include the step of bringing into association the active ingredients with the pharmaceutical carrier(s) or excipient(s). In general, the formulations are prepared by uniformly and intimately bringing into association the active ingredients with liquid carriers or finely divided solid carriers or both, and then, if necessary, shaping the product.

[0127] Liposomes

[0128] There are many organized surfactant structures besides microemulsions that have been studied and used for the formulation of drugs. These include monolayers, micelles, bilayers and vesicles. Vesicles, such as liposomes, have attracted great interest because of their specificity and the duration of action they offer from the standpoint of drug delivery. As used in the present invention, the term “liposome” means a vesicle composed of amphiphilic lipids arranged in a spherical bilayer or bilayers.

[0129] Liposomes are unilamellar or multilamellar vesicles which have a membrane formed from a lipophilic material and an aqueous interior. The aqueous portion contains the composition to be delivered. Cationic liposomes possess the advantage of being able to fuse to the cell wall. Non-cationic liposomes, although not able to fuse as efficiently with the cell wall, are taken up by macrophages in vivo.

[0130] Further advantages of liposomes include the following. Liposomes obtained from natural phospholipids are biocompatible and biodegradable; liposomes can incorporate a wide range of water and lipid soluble drugs; and liposomes can protect encapsulated drugs in their internal compartments from metabolism and degradation (Rosoff, in Pharmaceutical Dosage Forms, Lieberman, Rieger and Banker (Eds.), 1988, Marcel Dekker, Inc., New York, N.Y., volume 1, p. 245). Important considerations in the preparation of liposome formulations are the lipid surface charge, vesicle size and the aqueous volume of the liposomes.

[0131] Liposomes are useful for the transfer and delivery of active ingredients to the site of action. Because the liposomal membrane is structurally similar to biological membranes, when liposomes are applied to a tissue, the liposomes start to merge with the cellular membranes and as the merging of the liposome and cell progresses, the liposomal contents are emptied into the cell where the active agent may act.

[0132] Liposomes fall into two broad classes. Cationic liposomes are positively charged liposomes which interact with the negatively charged DNA molecules to form a stable complex. The positively charged DNA/liposome complex binds to the negatively charged cell surface and is internalized in an endosome. Due to the acidic pH within the endosome, the liposomes are ruptured, releasing their contents into the cell cytoplasm (Wang et al., Biochem. Biophys. Res. Commun., 1987, 147, 980-985).

[0133] Liposomes which are pH-sensitive or negatively-charged, entrap DNA rather than complex with it. Since both the DNA and the lipid are similarly charged, repulsion rather than complex formation occurs. Nevertheless, some DNA is entrapped within the aqueous interior of these liposomes. pH-sensitive liposomes have been used to deliver DNA encoding the thymidine kinase gene to cell monolayers in culture. Expression of the exogenous gene was detected in the target cells (Zhou et al., Journal of Controlled Release, 1992, 19, 269-274).

[0134] One major type of liposomal composition includes phospholipids other than naturally-derived phosphatidylcholine. Neutral liposome compositions, for example, can be formed from dimyristoyl phosphatidylcholine (DMPC) or dipalmitoyl phosphatidylcholine (DPPC). Anionic liposome compositions generally are formed from dimyristoyl phosphatidylglycerol, while anionic fusogenic liposomes are formed primarily from dioleoyl phosphatidylethanolamine (DOPE). Another type of liposomal composition is formed from phosphatidylcholine (PC) such as, for example, soybean PC, and egg PC. Another type is formed from mixtures of phospholipid and/or phosphatidylcholine and/or cholesterol.

[0135] Liposomes also include “sterically stabilized” liposomes, a term which, as used herein, refers to liposomes comprising one or more specialized lipids that, when incorporated into liposomes, result in enhanced circulation lifetimes relative to liposomes lacking such specialized lipids. Examples of sterically stabilized liposomes are those in which part of the vesicle-forming lipid portion of the liposome (A) comprises one or more glycolipids, such as monosialoganglioside G_{M1}, or (B) is derivatized with one or more hydrophilic polymers, such as a polyethylene glycol (PEG) moiety. While not wishing to be bound by any particular theory, it is thought in the art that, at least for sterically stabilized liposomes containing gangliosides, sphingomyelin, or PEG-derivatized lipids, the enhanced circulation half-life of these sterically stabilized liposomes derives from a reduced uptake into cells of the reticuloendothelial system (RES) (Allen et al., FEBS Letters, 1987, 223, 42; Wu et al., Cancer Research, 1993, 53, 3765).

[0136] Various liposomes including one or more glycolipids are known in the art. Papahadjopoulos et al. (Ann. N.Y. Acad. Sci., 1987, 507, 64) reported the ability of monosialoganglioside G_{M1}, galactocerebroside sulfate and phosphatidylinositol to improve blood half-lives of liposomes. These findings were expounded upon by Gabizon et al. (Proc. Natl. Acad. Sci. U.S.A., 1988, 85, 6949). U.S. Pat. No. 4,837,028 and WO 88/04924, both to Allen et al., disclose liposomes including (1) sphingomyelin and (2) the ganglioside G_{M1} or a galactocerebroside sulfate ester. U.S. Pat. No. 5,543,152 (Webb et al.) discloses liposomes comprising sphingomyelin. Liposomes comprising 1,2-sn-dimyristoylphosphatidylcholine are disclosed in WO 97/13499 (Lim et al).

[0137] Many liposomes including lipids derivatized with one or more hydrophilic polymers, and methods of preparation thereof, are known in the art. Sunamoto et al. (Bull. Chem. Soc. Jpn., 1980, 53, 2778) described liposomes comprising a nonionic detergent, 2C_{1215G}, that contains a PEG moiety. Ilium et al. (FEBS Lett., 1984, 167, 79) noted that hydrophilic coating of polystyrene particles with polymeric glycols results in significantly enhanced blood half-lives. Synthetic phospholipids modified by the attachment of carboxylic groups of polyalkylene glycols (e.g., PEG) are described by Sears (U.S. Pat. Nos. 4,426,330 and 4,534,899). Klibanov et al. (FEBS Lett., 1990, 268, 235) described experiments demonstrating that liposomes including phosphatidylethanolamine (PE) derivatized with PEG or PEG stearate have significant increases in blood circulation half-lives. Blume et al. (Biochimica et Biophysica Acta, 1990, 1029, 91) extended such observations to other PEG-derivatized phospholipids, e.g., DSPE-PEG, formed from the combination of distearoylphosphatidylethanolamine (DSPE) and PEG. Liposomes having covalently bound PEG moieties on their external surface are described in European Patent No. EP 0 445 131 B1 and WO 90/04384 to Fisher. Liposome compositions containing 1-20 mole percent of PE derivatized with PEG, and methods of use thereof, are described by Woodle et al. (U.S. Pat. Nos. 5,013,556 and 5,356,633) and Martin et al. (U.S. Pat. No. 5,213,804 and European Patent No. EP 0 496 813 B1). Liposomes comprising a number of other lipid-polymer conjugates are disclosed in WO 91/05545 and U.S. Pat. No. 5,225,212 (both to Martin et al.) and in WO 94/20073 (Zalipsky et al.) Liposomes comprising PEG-modified ceramide lipids are described in WO 96/10391 (Choi et al). U.S. Pat. No. 5,540,935 (Miyazaki et al.) and U.S. Pat. No. 5,556,948 (Tagawa et al.) describe PEG-containing liposomes that can be further derivatized with functional moieties on their surfaces.

[0138] A limited number of liposomes containing nucleic acids are known in the art. WO 96/40062 to Thierry et al. discloses methods for encapsulating high molecular weight nucleic acids in liposomes. U.S. Pat. No. 5,264,221 to Tagawa et al. discloses protein-bonded liposomes and asserts that the contents of such liposomes may include an dsRNA RNA. U.S. Pat. No. 5,665,710 to Rahman et al. describes certain methods of encapsulating oligodeoxynucleotides in liposomes. WO 97/04787 to Love et al. discloses liposomes comprising dsRNA dsRNAs targeted to the raf gene.

[0139] Transfersomes are yet another type of liposomes, and are highly deformable lipid aggregates which are attractive candidates for drug delivery vehicles. Transfersomes may be described as lipid droplets which are so highly deformable that they are easily able to penetrate through pores which are smaller than the droplet. Transfersomes are adaptable to the environment in which they are used, e.g. they are self-optimizing (adaptive to the shape of pores in the skin), self-repairing, frequently reach their targets without fragmenting, and often self-loading. To make transfersomes it is possible to add surface edge-activators, usually surfactants, to a standard liposomal composition. Transfersomes have been used to deliver serum albumin to the skin. The transfersome-mediated delivery of serum albumin has been shown to be as effective as subcutaneous injection of a solution containing serum albumin.

[0140] Surfactants find wide application in formulations such as emulsions (including microemulsions) and liposomes. The most common way of classifying and ranking the properties of the many different types of surfactants, both natural and synthetic, is by the use of the hydrophile/lipophile balance (HLB). The nature of the hydrophilic group (also known as the “head”) provides the most useful means for categorizing the different surfactants used in formulations (Rieger, in Pharmaceutical Dosage Forms, Marcel Dekker, Inc., New York, N.Y., 1988, p. 285).

[0141] If the surfactant molecule is not ionized, it is classified as a nonionic surfactant. Nonionic surfactants find wide application in pharmaceutical products and are usable over a wide range of pH values. In general their HLB values range from 2 to about 18 depending on their structure. Nonionic surfactants include nonionic esters such as ethylene glycol esters, propylene glycol esters, glyceryl esters, polyglyceryl esters, sorbitan esters, sucrose esters, and ethoxylated esters. Nonionic alkanolamides and ethers such as fatty alcohol ethoxylates, propoxylated alcohols, and ethoxylated/propoxylated block polymers are also included in this class. The polyoxyethylene surfactants are the most popular members of the nonionic surfactant class.

[0142] If the surfactant molecule carries a negative charge when it is dissolved or dispersed in water, the surfactant is classified as anionic. Anionic surfactants include carboxylates such as soaps, acyl lactylates, acyl amides of amino acids, esters of sulfuric acid such as alkyl sulfates and ethoxylated alkyl sulfates, sulfonates such as alkyl benzene sulfonates, acyl isethionates, acyl taurates and sulfosuccinates, and phosphates. The most important members of the anionic surfactant class are the alkyl sulfates and the soaps.

[0143] If the surfactant molecule carries a positive charge when it is dissolved or dispersed in water, the surfactant is classified as cationic. Cationic surfactants include quaternary ammonium salts and ethoxylated amines. The quaternary ammonium salts are the most used members of this class.

[0144] If the surfactant molecule has the ability to carry either a positive or negative charge, the surfactant is classified as amphoteric. Amphoteric surfactants include acrylic acid derivatives, substituted alkylamides, N-alkylbetaines and phosphatides.

[0145] The use of surfactants in drug products, formulations and in emulsions has been reviewed (Rieger, in Pharmaceutical Dosage Forms, Marcel Dekker, Inc., New York, N.Y., 1988, p. 285).

[0146] Agents that enhance uptake of dsRNAs at the cellular level may also be added to the pharmaceutical and other compositions of the present invention. For example, cationic lipids, such as lipofectin (Junichi et al, U.S. Pat. No. 5,705,188), cationic glycerol derivatives, and polycationic molecules, such as polylysine (Lollo et al., PCT Application WO 97/30731), are also known to enhance the cellular uptake of dsRNAs.

[0147] Other agents may be utilized to enhance the penetration of the administered nucleic acids, including glycols such as ethylene glycol and propylene glycol, pyrrols such as 2-pyrrol, azones, and terpenes such as limonene and menthone.

[0148] Carriers

[0149] Certain compositions suitable for intracranial administration also incorporate carrier compounds in the formulation. As used herein, “carrier compound” or “carrier” can refer to a nucleic acid, or analog thereof, which is inert (i.e., does not possess biological activity per se) but is recognized as a nucleic acid by in vivo processes that reduce the bioavailability of a nucleic acid having biological activity by, for example, degrading the biologically active nucleic acid or promoting its removal from circulation. The coadministration of a nucleic acid and a carrier compound, typically with an excess of the latter substance, can result in a substantial reduction of the amount of nucleic acid recovered in the liver, kidney or other extracirculatory reservoirs, presumably due to competition between the carrier compound and the nucleic acid for a common receptor. For example, the recovery of a partially phosphorothioate dsRNA in hepatic tissue can be reduced when it is coadministered with polyinosinic acid, dextran sulfate, polycytidic acid or 4-acetamido-4′ isothiocyano-stilbene-2,2′-disulfonic acid (Miyao et al., DsRNA Res. Dev., 1995, 5, 115-121; Takakura et al., DsRNA & Nucl. Acid Drug Dev., 1996, 6, 177-183.

[0150] Excipients

[0151] In contrast to a carrier compound, a “pharmaceutical carrier” or “excipient” is a pharmaceutically acceptable solvent, suspending agent or any other pharmacologically inert vehicle for delivering one or more nucleic acids to an animal. The excipient may be liquid or solid and is selected, with the planned manner of administration in mind, so as to provide for the desired bulk, consistency, etc., when combined with a nucleic acid and the other components of a given pharmaceutical composition. Typical pharmaceutical carriers include, but are not limited to, binding agents (e.g., pregelatinized maize starch, polyvinylpyrrolidone or hydroxypropyl methylcellulose, etc.); fillers (e.g., lactose and other sugars, microcrystalline cellulose, pectin, gelatin, calcium sulfate, ethyl cellulose, polyacrylates or calcium hydrogen phosphate, etc.); lubricants (e.g., magnesium stearate, talc, silica, colloidal silicon dioxide, stearic acid, metallic stearates, hydrogenated vegetable oils, corn starch, polyethylene glycols, sodium benzoate, sodium acetate, etc.); disintegrants (e.g., starch, sodium starch glycolate, etc.); and wetting agents (e.g., sodium lauryl sulphate, etc).

[0152] Pharmaceutically acceptable organic or inorganic excipient suitable for non-parenteral administration which do not deleteriously react with nucleic acids can also be used to formulate the compositions of the present invention. Suitable pharmaceutically acceptable carriers include, but are not limited to, water, salt solutions, alcohols, polyethylene glycols, gelatin, lactose, amylose, magnesium stearate, talc, silicic acid, viscous paraffin, hydroxymethylcellulose, polyvinylpyrrolidone and the like.

[0153] Suitable pharmaceutically acceptable excipients include, but are not limited to, water, salt solutions, alcohol, polyethylene glycols, gelatin, lactose, amylose, magnesium stearate, talc, silicic acid, viscous paraffin, hydroxymethylcellulose, polyvinylpyrrolidone and the like.

[0154] Other Components

[0155] The compositions suitable for intracranial administration may additionally contain other adjunct components conventionally found in pharmaceutical compositions, at their art-established usage levels. Thus, for example, the compositions may contain additional, compatible, pharmaceutically-active materials such as, for example, antipruritics, astringents, local anesthetics or anti-inflammatory agents, or may contain additional materials useful in physically formulating various dosage forms of the compositions of the present invention, such as dyes, flavoring agents, preservatives, antioxidants, opacifiers, thickening agents and stabilizers. However, such materials, when added, should not unduly interfere with the biological activities of the components of the compositions of the present invention. The formulations can be sterilized and, if desired, mixed with auxiliary agents, e.g., lubricants, preservatives, stabilizers, wetting agents, emulsifiers, salts for influencing osmotic pressure, buffers, colorings, flavorings and/or aromatic substances and the like which do not deleteriously interact with the nucleic acid(s) of the formulation.

[0156] Aqueous suspensions may contain substances which increase the viscosity of the suspension including, for example, sodium carboxymethylcellulose, sorbitol and/or dextran. The suspension may also contain stabilizers.

[0157] Certain embodiments provide the use of pharmaceutical compositions containing (a) one or more antisense compounds and (b) one or more other antiviral agents that function by a non-antisense mechanism. Examples of such antiviral agents include but are not limited to members of classes of agents including reverse transcriptase inhibitors; protease inhibitors; thymidine kinase inhibitors; sugar or glycoprotein synthesis inhibitors; structural protein synthesis inhibitors; nucleoside analogues; and viral maturation inhibitors. Specific non-limiting examples of anti-virals include nevirapine, delavirdine, efavirenz, saquinavir, ritonavir, ribivirin, vidarabine, indinavir, nelfinavir, amprenavir, zidovudine (AZT), stavudine (d4T), larnivudine (3TC), didanosine (DDI), zalcitabine (ddC), abacavir, acyclovir, penciclovir, valacyclovir, ganciclovir, 1,-D-ribofuranosyl-1,2,4-triazole-3 carboxamide, 9->2-hydroxy-ethoxy methylguanine, adamantanamine, 5-iodo-2′-deoxyuridine, trifluorothymidine, interferon and adenine arabinoside. When used with the dsRNAs featured in the invention, such antiviral agents may be used individually, sequentially, or in combination with one or more other such antiviral agents. Anti-inflammatory drugs, including but not limited to nonsteroidal anti-inflammatory drugs and corticosteroids may also be combined in compositions. See, generally, The Merck Manual of Diagnosis and Therapy, 15th Ed., Berkow et al., eds., 1987, Rahway, N.J., pages 2499-2506 and 46-49, respectively). Other non-antisense antiviral agents are also within the scope of this invention. Two or more combined compounds may be used together or sequentially.

[0158] Toxicity and therapeutic efficacy of such compounds can be determined by standard pharmaceutical procedures in cell cultures or experimental animals, e.g., for determining the LD50 (the dose lethal to 50% of the population) and the ED50 (the dose therapeutically effective in 50% of the population). The dose ratio between toxic and therapeutic effects is the therapeutic index and it can be expressed as the ratio LD50/ED50. Compounds which exhibit high therapeutic indices are typical.

[0159] The data obtained from cell culture assays and animal studies can be used in formulating a range of dosage for use in humans. The dosage of compositions featured in the invention lies generally within a range of circulating concentrations that include the ED50 with little or no toxicity. The dosage may vary within this range depending upon the dosage form employed and the route of administration utilized. For any compound used in the methods featured in the invention, the therapeutically effective dose can be estimated initially from cell culture assays. A dose may be formulated in animal models to achieve a circulating plasma concentration range of the compound or, when appropriate, of the polypeptide product of a target sequence (e.g., achieving a decreased concentration of the polypeptide) that includes the IC50 (i.e., the concentration of the test compound which achieves a half-maximal inhibition of symptoms) as determined in cell culture. Such information can be used to more accurately determine useful doses in humans. Levels in plasma may be measured, for example, by high performance liquid chromatography.

[0160] In addition to their administration individually or as a plurality, as discussed above, dsRNAs targeting JC virus can be administered in combination with other known agents effective in treatment of pathological processes mediated by JC virus expression. In any event, the administering physician can adjust the amount and timing of dsRNA administration on the basis of results observed using standard measures of efficacy known in the art or described herein.

[0161] Methods for Treating Diseases Caused by Expression of a Gene in the Brain

[0162] The invention relates in particular to the administration of a dsRNA or a pharmaceutical composition prepared therefrom for the treatment or prevention of pathological conditions associated with gene expression in the brain, such as from a JC virus infection, e.g., PML, or a brain tumor, such as glioblastoma multiforme. Owing to the inhibitory effect on gene expression, e.g., JC virus expression, a dsRNA according to the invention or a pharmaceutical composition prepared therefrom can enhance the quality of life, particularly in a patient being treated with an anti-VLA4 antibody (e.g., Tysabri™) as part of treatment for MS.

[0163] Administration is typically to the central nervous system of the individual, such as into oligodendrocytes, e.g., oligodendrocytes of the corpus callosum. Administration can also be to other areas of white matter in the brain, or into the striatum, such as by intrastriatal infusion.

[0164] The invention also relates to the use of a dsRNA or a pharmaceutical composition thereof for treating PML in combination with other pharmaceuticals and/or other therapeutic methods, e.g., with known pharmaceuticals and/or known therapeutic methods, such as, for example, those which are currently employed for treating and/or preventing viral infection.

[0165] In some embodiments, dsRNAs targeting CNPase are useful for treating a neurological disorder, e.g., schizophrenia, Down Syndrome, Alzheimer's Disease or Huntington's Disease. In other embodiments, dsRNAs targeting a gene expressed in the corpus callosum, e.g., in oligodendrocytes of the corpus callosum are useful for treatment of, for example, Parkinson's disease, multiple sclerosis, amyotrophic lateral sclerosis, autoimmune encephalomyelitis, stroke, or Huntington's disease.

[0166] The dsRNA and an additional therapeutic agent can be administered in the same combination, e.g., intracranially, such as into the corpus callosum, or the additional therapeutic agent can be administered as part of a separate composition, intracranially or by another method described herein.

[0167] The invention features a method of administering a dsRNA directly to a cell in the brain of a mammal, e.g., to an oligodendrocyte in the brain of a mammal. The dsRNA can target a gene of the JC virus, for example, in a patient infected with JC virus. Patients can be administered a therapeutic amout of dsRNA, such as 0.2 mg/kg, 0.1 mg/kg, 0.5 mg/kg, 1.0 mg/kg, 1.5 mg/kg, 2.0 mg/kg, or 2.5 mg/kg dsRNA. The dsRNA can be administered by intravenous infusion over a period of time, such as over a 5 minute, 10 minute, 15 minute, 20 minute, or 25 minute period. The administration is repeated, for example, on a regular basis, such as biweekly (i.e., every two weeks) for one month, two months, three months, four months or longer. After an initial treatment regimen, the treatments can be administered on a less frequent basis. For example, after administration biweekly for three months, administration can be repeated once per month, for six months or a year or longer. Administration of the dsRNA can reduce JC virus mRNA levels in a sample of the patient, e.g., a blood sample, by at least 20%, 25%, 30%, 40%, 50%, 60%, 70%, 80% or 90% or more.

[0168] In some embodiments, the dsRNA can be administered by intracranial infusion over a period of time, such as over a 30 minute, 1 hour, 2 hour, 3 hour or 4 hour period. The administration can be repeated, for example, on a regular basis, such as biweekly (i.e., every two weeks) for one month, two months, three months, four months or longer. After an initial treatment regimen, the treatments can be administered on a less frequent basis. For example, after administration biweekly for three months, administration can be repeated once per month, for six months or a year or longer. Intracranial infusion can be continous.

[0169] Before administration of a full dose of the dsRNA, patients can be administered a smaller dose, such as a 5% infusion reaction, and monitored for adverse effects, such as an allergic reaction

[0170] Many neurodegenerative-associated diseases and disorders are hereditary. Therefore, a patient in need of a dsRNA targeting a gene expressed in the corpus callosum can be identified by taking a family history. A healthcare provider, such as a doctor, nurse, or family member, can take a family history before prescribing or administering a dsRNA. A DNA test may also be performed on the patient to identify a mutation in the target gene, before a dsRNA is administered to the patient.

[0171] The invention can also be practiced by including with a specific RNAi agent, in combination with another anti-viral agent, such as any conventional anti-viral agent. The combination of a specific binding agent with such other agents can potentiate the anti-viral protocol. Thus, methods can be employed with such conventional regimens with the benefit of reducing side effects and enhancing efficacy.

[0172] Methods for Inhibiting Expression of a Gene from the JC Virus

[0173] In yet another aspect, the invention provides a method for inhibiting the expression of a gene from the JC Virus in a mammal. The method includes administering a dsRNA to the mammal such that expression of the target JC virus genome is silenced. Because of their high specificity, the dsRNAs featured in the invention specifically target RNAs (primary or processed) of the target JC virus gene. Compositions and methods for inhibiting the expression of these JC virus genes using dsRNAs can be performed as described elsewhere herein.

[0174] In one embodiment, the method includes administering a composition containing a dsRNA, where the dsRNA includes a nucleotide sequence that is complementary to at least a part of an RNA transcript of a gene from the JC Virus, to the mammal to be treated. The compositions are administered into oligodendrocytes, such as into oligodendrocytes within the corpus callosum.

[0175] Unless otherwise defined, all technical and scientific terms used herein have the same meaning as commonly understood by one of ordinary skill in the art to which this invention belongs. Although methods and materials similar or equivalent to those described herein can be used in the practice or testing of the invention, suitable methods and materials are described below. All publications, patent applications, patents, and other references mentioned herein are incorporated by reference in their entirety. In case of conflict, the present specification, including definitions, will control. In addition, the materials, methods, and examples are illustrative only and not intended to be limiting.

### EXAMPLES

### Example 1

### Design of JCV siRNAs

[0176] Full-length genome sequences to JC virus available on Apr. 10, 2006, were obtained, resulting in a target pool of 388 sequences (accession numbers: AB038249.1-AB038255.1; AB048545.1-AB048582.1; AB074575.1-AB074591.1; AB077855.1-AB077879.1; AB081005.1-AB081030.1; AB081600.1-AB081618.1; AB081654.1; AB092578.1-AB092587.1; AB103387.1; AB103402.1-AB103423.1; AB104487.1; AB113118.1-AB113145.1; AB118651.1-AB118659.1; AB126981.1-AB127027.1; AB127342.1; AB127344.1; AB127346.1-AB127349.1; AB127352.1-AB127353.1; AB198940.1-AB198954.1; AB220939.1-AB220943.1; AF004349.1-AF004350.1; AF015526.1-AF015537.1; AF015684.1; AF030085.1; AF281599.1-AF281626.1; AF295731.1-AF295739.1; AF300945.1-AF300967.1; AF363830.1-AF363834.1; AF396422.1-AF396435.1; AY121907.1-AY121915.1; NC_{—}001699.1; U61771.1; U73500.1-U73502.1). NC_{—}001699 was defined as reference sequence.

[0177] The siRNA selection process was run as follows: ClustalW multiple alignment was used to generate a global alignment of all sequences from the target pool. An IUPAC consensus sequence was then generated.

[0178] All conserved 19 mer target sequences from the IUPAC consensus represented by stretches containing only A, T, C or G bases, which are therefore present in all sequences of the target pool were selected. In order to only select siRNAs that target transcribed sequence parts of the JC virus, candidate target sequences were selected out of the pool of conserved 19 mer target sequences. For this, candidate target sequences covering regions between nucleotide 163-2594 and between 2527-5115 relative to reference sequence were extracted for late and early genes, respectively. Further, as sequences for early genes are in reverse complement orientation compared with genomic sequences, candidate target sequences of these genes were transferred to reverse complement sequences and replaced the former pool of candidate target sequences.

[0179] In order to rank candidate target sequences and their respective siRNAs and select appropriate ones, their predicted potential for interacting with irrelevant targets (off-target potential) was taken as a ranking parameter. siRNAs with low off-target potential were defined as preferable and assumed to be more specific in vivo.

[0180] For predicting siRNA-specific off-target potential, the following assumptions were made:
[0181] 1) positions 2 to 9 (counting 5′ to 3′) of a strand (seed region) may contribute more to off-target potential than rest of sequence (non-seed and cleavage site region)
[0182] 2) positions 10 and 11 (counting 5′ to 3′) of a strand (cleavage site region) may contribute more to off-target potential than non-seed region
[0183] 3) an off-target score can be calculated for each hit, based on identity to siRNA sequence and position of mismatches
[0184] 4) assuming potential abortion of sense strand activity by internal modifications introduced, only off-target potential of antisense strand will be relevant

[0185] To identify potential off-target genes, 19 mer input sequences were subjected to a homology search against publically available human mRNA sequences.

[0186] To this purpose, fastA (version 3.4) searches were performed with all 19 mer candidate target sequences against a human RefSeq database (downloaded available version from ftp://ftp.ncbi.nih gov/refseq/on Nov. 7, 2006). FastA searches were executed with parameters-values-pairs—f 50-g 50 in order to take into account the homology over the full length of the 19 mer without any gaps. In order to ensure the listing of all relevant off-target hits in the fastA output file the parameter—E 30000 was used in addition. A scoring matrix was applied for the run that assessed every nucleotide match with a score of 13 and every mismatch with a score of −7. The search resulted in a list of potential off-targets for each candidate siRNA.

[0187] To sort the resulting list of potential off-targets for each siRNA, fastA output files were analyzed to identify the best off-target and its off-target score. The following off-target properties for each 19 mer input sequence were extracted for each off-target to calculate the off-target score:
[0188] Number of mismatches in non-seed region
[0189] Number of mismatches in seed region
[0190] Number of mismatches in cleavage site region

[0191] The off-target score was calculated for considering assumption 1 to 3 as follows:

$$Off \text{-} target score = number of seed mismatches * 10 + number of cleavage site mismatches * 1.2 + number of non \text{-} seed mismatches * 1$$

[0192] The most relevant off-target gene for input each 19 mer input sequences was defined as the gene with the lowest off-target score. Accordingly, the lowest off-target score was defined as the relevant off-target score for the corresponding siRNA.

[0193] In order to generate a ranking for siRNAs, calculated relevant off-target scores were transferred into a result table. All siRNAs were sorted according to the off-target score (descending).

[0194] An off-target score of 2.2 was defined as cut-off for siRNA selection (specificity criterion). In addition, all sequences with only one mismatch in the seed region were eliminated from the screening set. The selection procedure resulted in a set of 93 JCV specific siRNAs (Table 8).

[0195] An expanded screening was generated by re-calculating the predicted specificity based on the newly available human RefSeq database (Human mRNA sequences in RefSeq release version 21 (downloaded Jan. 12, 2007)) and selecting only 208 siRNAs that did not contain more than 3 G's in a row and had an off-target score of at least 2 for the antisense strand (Table 10).

Synthesis of JCV siRNAs

[0196] All siRNAs were synthesized in 0.2 μmole synthesis scale on an ABI3900 DNA synthesizer according to standard procedures.

[0197] For the initial screening set (93 different siRNA sequences), 4 different strategies of chemical modification were used:
[0198] a) exo/endo light (EEL): -sense strand: 2′-O-methyl @ all pyrimidines, PTO between nucleotides 20 and 21 (counting from 5′-end), dTdT at 3′-end (nucleotides 20 and 21)
   [0199] antisense strand: 2′-O-methyl at pyrimidines in 5′-UA-3′ and 5′-CA-3′ motives, PTO between nucleotides 20 and 21 (counting from 5′-end), dTdT at 3′-end (nucleotides 20 and 21)
[0200] b) EEL plus 2′-O-methyl in position 2 of antisense strand (only if no 5′-UA-3′ and 5′-CA-3′ at 5′-end, otherwise already covered by EEL)
[0201] c) EEL plus 2′-O-methyl in position 2 of sense strand (only if no pyrimidine in position 2, otherwise already covered by EEL)
[0202] d) EEL plus 2′-O-methyl in position 2 of sense and antisense strand (only if not already covered by a, b, and c) (Table 8)

[0203] For the expanded screening set (208 different siRNA sequences), siRNAs were composed of unmodified RNA oligonucleotides with dT/dT overhangs (dTdT at 3′-end (nucleotides 20 and 21) of antisense and sense strands) (Table 10).

Synthesis of Conjugated siRNAs

[0204] siRNAs conjugated to Vitamine E were prepared according to schemes 1 and 2. It is understood that other conjugates can be linked to the oligonucleotides via a similar method known to one of ordinary skill in the art, such methods can be found in U.S. publication nos. 2005/0107325, 2005/0164235, 2005/0256069 and 2008/0108801, which are hereby incorporated by their entirety.

[chemical structure]

[chemical structure]

[chemical structure]

[chemical structure]

[chemical structure]

[chemical structure]

TABLE 1
Sequence of conjugated CNPase dsRNAs

| | SEQ | | | |
|---|---|---|---|---|
| | ID | | SEQ | |
| Duplex | NO: | Sense (5′ to 3′) | ID NO: | Antisense (5′ to 3′) |
| AD-3178 | 2045 | GGccuuGAccucuuAGAGAdTdTL10 | 2046 | UCUCuAAGAGGUcAAGGCCTsT |
| AD-3222 | 2047 | GGccuuGAccucuuAGAGAdTdTQ51L10 | 2048 | UCUCuAAGAGGUcAAGGCCTsT |
| AD-3181 | 2049 | GGccuuGAccucuuAGAGAdTdTL13 | 2050 | UCUCuAAGAGGUcAAGGCCTsT |
| AD-3569 | 2051 | GGccuuGAccucuuAGAGAdTdTQ51L13 | 2052 | UCUCuAAGAGGUcAAGGCCTsT |
| AD-18233 | 2053 | GGccuuGAccucuuAGAGAuUUUL13 | 2054 | AAAAUCUCuAAGAGGUcAAGGCCUG |
| AD-18528 | 2055 | GGccuuGAccucuuAGAGAdTdTL99 | 2056 | UCUCuAAGAGGUcAAGGCCTsT |

TABLE 2
Nucleotide designations for dsRNAs

| | |
|---|---|
| A | adenosine-3′-phosphate |
| C | cytidine-3′-phosphate |
| G | guanosine-3′-phosphate |
| T | 5-methyluridine-3′-phosphate |
| U | uridine-3′-phosphate |
| c | 2′-O-methylcytidine-3′-phosphate |
| dT | 2′-deoxythymidine-3′-phosphate |
| u | 2′-O-methyluridine-3′-phosphate |
| Ts | 5-methyluridine-3′-phosphorothioate |
| Y14 | 5-(psoralencarboxamidoethyl-3-acrylimido)thymidine-3′-phosphate |
| Q51 | 6-hydroxyhexyldithiohexylphosphate (Thiol-Modifier |
| | C6 S-S Glen Res. 10-1936) |
| L10 | N-(cholesterylcarboxamidocaproyl)-4-hydroxyprolinol |
| | (Hyp-C6-Chol) |
| L13 | N-(tocopherylcarboxamidocaproyl)-4-hydroxyprolinol |
| | (Hyp-C6-Vit. E) |
| L99 | aminoethyldithiobutyryl)-4-hydroxyprolinol [Hyp-C4-S-S-NH2] |
| L79 | N-(alpha-tocopherylcarboxamidoethyl-dithio-butyryl)-4- |
| | hydroxyprolinol (Hyp-S-S-VitE) |

Screening of JCV siRNAs

[0205] Construction of Reporter-Systems Encoding JCV Transcripts

[0206] The sequence of the early JCV transcript (E) was synthesized at GENEART (Regensburg, Germany) and cloned into GENEART standard vectors. The sequence of the late JCV transcript was subdivided in a first approach into two fragments: L1, including the transcript sequence of the VP1 protein, and LA23, including the sequences of VP2, VP3 and the Agnoprotein. Due to cloning problems with fragment LA23, this sequence was subdivided in a second approach into two fragments (LA23 1-700 and LA23 701-1438). All sequences were synthesized at GENEART and cloned into GENEART standard vectors. All fragments (E, L1, LA23 1-700 and LA23 701-1438) were subcloned into psiCheck-2 (Promega, Mannheim, Germany) via XhoI and NotI (both NEB, Frankfurt, Germany), resulting in constructs with the JCV sequences between the stop-codon and the polyA-signal of Renilla luciferase.

L1
(SEQ ID NO: 931)

CTCGAGACTTTTAGGGTTGTACGGGACTGTAACACCTGCTCTTGAAGCATATGAAGATGGCCCC
AACAAAAAGAAAAGGAGAAAGGAAGGACCCCGTGCAAGTTCCAAAACTTCTTATAAGAGGAGGA
GTAGAAGTTCTAGAAGTTAAAACTGGGGTTGACTCAATTACAGAGGTAGAATGCTTTTTAACTC
CAGAAATGGGTGACCCAGATGAGCATCTTAGGGGTTTTAGTAAGTCAATTTCTATATCAGATAC
ATTTGAAAGTGACTCCCCAAATAAGGACATGCTTCCTTGTTACAGTGTGGCCAGAATTCCACTA
CCCAATCTAAATGAGGATCTAACCTGTGGAAATATACTAATGTGGGAGGCTGTGACCTTAAAAA
CTGAGGTTCTAGGGGTGACAACTTTGATGAATGTGCACTCTAATGGTCAAGCAACTCATGACAA
TGGTGCAGGAAAGCCAGTGCAGGGCACCAGCTTTCATTTTTTTTCTGTTGGCGGGGAGGCTTTA
GAATTACAGGGGGTGGTTTTTAATTACAGAACAAAGTACCCAGATGGAACAATTTTTCCAAAGA
ATGCAACAGTGCAATCTCAAGTAATGAACACAGAGCACAAGGCGTACCTAGATAAGAACAAAGC
ATATCCTGTTGAATGTTGGGTTCCTGATCCCACCAGAAATGAAAACACAAGATATTTTGGGACA
CTAACAGGAGGAGAAAATGTTCCTCCAGTTCTTCATATAACAAACACTGCCACAACAGTGCTGC
TTGATGAATTTGGTGTTGGGCCACTTTGCAAAGGTGACAACTTGTATTTGTCAGCTGTTGATGT
TTGTGGAATGTTTACTAACAGATCTGGTTCCCAGCAGTGGAGAGGACTGTCCAGATATTTTAAG
GTTCAGCTCAGAAAAAGGAGGGTTAAAAACCCCTACCCAATTTCTTTCCTTCTTACTGATTTGA
TTAACAGAAGGACCCCTAGAGTTGATGGGCAACCTATGTATGGTATGGATGCTCAGGTAGAGGA
GGTTAGAGTTTTTGAGGGGACAGAGGAACTTCCAGGGGACCCAGACATGATGAGATATGTTGAC
AGATATGGACAGTTGCAAACAAAGATGCTGTAATCAAAATCCTTTATTGTAATATGCAGTACAT
TTTAATAAAGTATAACCAGCTTTACTTTACAGTTGCAGTCATGCGGCCGC
E

(SEQ ID NO: 932)
CTCGAGCCGCCTCCAAGCTTACTCAGAAGTAGTAAGGGCGTGGAGGCTTTTTAGGAGGC
CAGGGAAATTCCCTTGTTTTTCCCTTTTTTGCAGTAATTTTTTGCTGCAAAAAGCTAAAATGGA
CAAAGTGCTGAATAGGGAGGAATCCATGGAGCTTATGGATTTATTAGGCCTTGATAGGTCTGCA
TGGGGGAACATTCCTGTCATGAGAAAAGCTTATCTGAAAAAATGCAAAGAACTCCACCCTGATA
AAGGTGGGGACGAAGACAAGATGAAGAGAATGAATTTTTTATATAAAAAAATGGAACAAGGTGT
AAAAGTTGCTCATCAGCCTGATTTTGGTACATGGAATAGTTCAGAGGTTGGTTGTGATTTTCCT
CCTAATTCTGATACCCTTTATTGCAAGGAATGGCCTAACTGTGCCACTAATCCTTCAGTGCATT
GCCCCTGTTTAATGTGCATGCTAAAATTAAGGCATAGAAACAGAAAATTTTTAAGAAGCAGCCC
ACTTGTGTGGATAGATTGCTATTGCTTTGATTGCTTCAGACAATGGTTTGGGTGTGACTTAACC
CAAGAAGCTCTTCATTGCTGGGAGAAAGTTCTTGGAGACACCCCCTACAGGGATCTAAAGCTTT
AAGTGCCAACCTATGGAACAGATGAATGGGAATCCTGGTGGAATACATTTAATGAGAAGTGGGA
TGAAGACCTGTTTTGCCATGAAGAAATGTTTGCCAGTGATGATGAAAACACAGGATCCCAACAC
TCTACCCCACCTAAAAAGAAAAAAAAGGTAGAAGACCCTAAAGACTTTCCTGTAGATCTGCATG
CATTCCTCAGTCAAGCTGTGTTTAGTAATAGAACTGTTGCTTCTTTTGCTGTGTATACCACTAA
AGAAAAAGCTCAAATTTTATATAAGAAACTTATGGAAAAATATTCTGTAACTTTTATAAGTAGA
CATGGTTTTGGGGGTCATAATATTTTGTTTTTCTTAACACCACATAGACATAGAGTGTCAGCAA
TTAATAACTACTGTCAAAAACTATGTACCTTTAGTTTTTTAATTTGTAAAGGTGTGAATAAGGA
ATACTTGTTTTATAGTGCCCTGTGTAGACAGCCATATGCAGTAGTGGAAGAAAGTATTCAGGGG
GGCCTTAAGGAGCATGACTTTAACCCAGAAGAACCAGAAGAAACTAAGCAGGTTTCATGGAAAT
TAGTTACACAGTATGCCTTGGAAACCAAGTGTGAGGATGTTTTTTTGCTTATGGGCATGTACTT
AGACTTTCAGGAAAACCCACAGCAATGCAAAAAATGTGAAAAAAAGGATCAGCCAAATCACTTT
AACCATCATGAAAAACACTATTATAATGCCCAAATTTTTGCAGATAGCAAAAATCAAAAAAGCA
TTTGCCAGCAGGCTGTTGATACTGTAGCAGCCAAACAAAGGGTTGACAGCATCCACATGACCAG
AGAAGAAATGTTAGTTGAAAGGTTTAATTTCTTGCTTGATAAAATGGACTTAATTTTTGGGGCA
CATGGCAATGCTGTTTTAGAGCAATATATGGCTGGGGTGGCCTGGATTCATTGCTTGCTGCCTC
AAATGGACACTGTTATTTATGACTTTCTAAAATGCATTGTATTAAACATTCCAAAAAAAAGGTA
CTGGCTATTCAAGGGGCCAATAGACAGTGGCAAAACTACTTTAGCTGCAGCTTTACTTGATCTC
TGTGGGGGAAAGTCATTAAATGTTAATATGCCATTAGAAAGATTAAACTTTGAATTAGGAGTGG
GTATAGATCAGTTTATGGTTGTATTTGAGGATGTAAAAGGCACTGGTGCAGAGTCAAGGGATTT
ACCTTCAGGGCATGGCATAAGCAACCTTGATTGCTTAAGAGATTACTTAGATGGAAGTGTAAAA
GTTAATTTAGAGAGAAAACACCAAAACAAAAGAACACAGGTGTTTCCACCTGGAATTGTAACCA
TGAATGAATATTCAGTGCCTAGAACTTTACAGGCCAGATTTGTAAGGCAGATAGATTTTAGACC
AAAGGCCTACCTGAGAAAATCACTAAGCTGCTCTGAGTATTTGCTAGAAAAAAGGATTTTGCAA
AGTGGTATGACTTTGCTTTTGCTTTTAATCTGGTTTAGGCCAGTTGCTGACTTTGCAGCTGCCA
TTCATGAGAGGATTGTGCAGTGGAAAGAAAGGCTGGATTTAGAAATAAGCATGTATACATTTTC
TACTATGAAAGCTAATGTTGGTATGGGGAGACCCATTCTTGACTTTCCTAGAGAGGAAGATTCT
GAAGCAGAAGACTCTGGACATGGATCAAGCACTGAATCACAATCACAATGCTTTTCCCAGGTCT
CAGAAGCCTCTGGTGCAGACACACAGGAAAACTGCACTTTTCACATCTGTAAAGGCTTTCAATG
TTTCAAAAAACCAAAGACCCCTCCCCCAAAATAACTGCAACTGTGCGGCCGC
LA23 1-700
(SEQ ID NO: 933)
CTCGAGCAGCTAACAGCCAGTAAACAAAGCACAAGGGGAAGTGGAAAGCAGCCAAGGGAACATG
TTTTGCGAGCCAGAGCTGTTTTGGCTTGTCACCAGCTGGCCATGGTTCTTCGCCAGCTGTCACG
TAAGGCTTCTGTGAAAGTTAGTAAAACCTGGAGTGGAACTAAAAAAAGAGCTCAAAGGATTTTA
ATTTTTTTGTTAGAATTTTTGCTGGACTTTTGCACAGGTGAAGACAGTGTAGACGGGAAAAAAA
GACAGAGACACAGTGGTTTGACTGAGCAGACATACAGTGCTTTGCCTGAACCAAAAGCTACATA
GGTAAGTAATGTTTTTTTTTGTGTTTTCAGGTTCATGGGTGCCGCACTTGCACTTTTGGGGGAC
CTAGTTGCTACTGTTTCTGAGGCTGCTGCTGCCACAGGATTTTCAGTAGCTGAAATTGCTGCTG
GAGAGGCTGCTGCTACTATAGAAGTTGAAATTGCATCCCTTGCTACTGTAGAGGGGATTACAAG
TACCTCTGAGGCTATAGCTGCTATAGGCCTTACTCCTGAAACATATGCTGTAATAACTGGAGCT
CCGGGGGCTGTAGCTGGGTTTGCTGCATTGGTTCAAACTGTAACTGGTGGTAGTGCTATTGCTC
AGTTGGGATATAGATTTTTTGCTGACTGGGATCATAAAGTTTCAACAGTTGGGCTTTTTCGCGG
CCGC
LA23 701-1438
(SEQ ID NO: 934)
CTCGAGAGCAGCCAGCTATGGCTTTACAATTATTTAATCCAGAAGACTACTATGATATTTTATT
TCCTGGAGTGAATGCCTTTGTTAACAATATTCACTATTTAGATCCTAGACATTGGGGCCCGTCC
TTGTTCTCCACAATCTCCCAGGCTTTTTGGAATCTTGTTAGAGATGATTTGCCAGCCTTAACCT
CTCAGGAAATTCAGAGAAGAACCCAAAAACTATTTGTTGAAAGTTTAGCAAGGTTTTTGGAAGA
AACTACTTGGGCAATAGTTAATTCACCAGCTAACTTATATAATTATATTTCAGACTATTATTCT
AGATTGTCTCCAGTTAGGCCCTCTATGGTAAGGCAAGTTGCCCAAAGGGAGGGAACCTATATTT
CTTTTGGCCACTCATACACCCAAAGTATAGATGATGCAGACAGCATTCAAGAAGTTACCCAAAG
GCTAGATTTAAAAACCCCAAATGTGCAATCTGGTGAATTTATAGAAAGAAGTATTGCACCAGGA
GGTGCAAATCAAAGATCTGCTCCTCAATGGATGTTGCCTTTACTTTTAGGGTTGTACGGGACTG
TAACACCTGCTCTTGAAGCATATGAAGATGGCCCCAACAAAAAGAAAAGGAGAAAGGAAGGACC
CCGTGCAAGTTCCAAAACTTCTTATAAGAGGAGGAGTAGAAGTTCTAGAAGTTAAAACTGGGGT
TGACTCAATTACAGAGGTAGAATGCTGCGGCCGC

### Example 2

### Screen of JCV siRNAs in Transfected Cells

[0207] Cos-7 cells (DSMZ, Braunschweig, Germany, # ACC-60) were seeded at 1.5×10⁴ cells/well on white 96-well plates with clear bottoms (Greiner Bio-One GmbH, Frickenhausen, Germany) in 75 μl of growth medium. Directly after seeding the cells, 50 ng of the corresponding reporter-plasmid per well was transfected with Lipofectamine™ 2000 (Invitrogen GmbH, Karlsruhe, Germany), with the plasmid diluted in Opti-MEM to a final volume of 12.5 μl per well, prepared as a mastermix for the whole plate.

[0208] 4 h after plasmid transfection, growth medium was removed from cells and replaced by 100 μl/well of fresh medium. siRNA transfections were performed using Lipofectamine™ 2000 (Invitrogen GmbH, Karlsruhe, Germany) as described by the manufacturer. Cells were incubated for 24 h at 37° C. and 5% CO₂ in a humidified incubator (Heraeus GmbH, Hanau, Germany). For the primary screen, all siRNAs were screened at a final concentration of 30 nM. Selected sequences were rescreened at a siRNA concentration of 300 pM. Each siRNA was tested in quadruplicate for each concentration.

[0209] Cells were lysed by removing growth medium and application of 150 μl of a 1:1 mixture consisting of medium and substrate from the Dual-Glo Luciferase Assay System (Promega, Mannheim, Germany). The luciferase assay was performed according to the manufacturer's protocol for Dual-Glo Luciferase assay and luminescence was measured in a Victor-Light 1420 Luminescence Counter (Perkin Elmer, Rodgau-Jügesheim, Germany). Values obtained with Renilla luciferase were normalized to the respective values obtained with Firefly luciferase in order to correct for transfection efficacy. Renilla/Firefly luciferase activities obtained after transfection with siRNAs directed against a JCV gene were normalized to Renilla/Firefly luciferase activities obtained after transfection of an unrelated control siRNA set to 100%. Tables 8, 10, and 13-16 provide the results where the siRNAs, the sequences of which are given in Tables 8, 10, and 13-16, were tested at a single dose of 30 nM. The percentage inhibition±standard deviation, compared to the unrelated control siRNA, is indicated in the column ‘Remaining luciferase activity (% of control)’. A number of JCV siRNAs at 30 nM were effective at reducing levels of the targeted mRNA by more than 70% in Cos-7 cells (i.e. remaining luciferase activity was less than 30%).

[0210] Selected JCV siRNAs from the single dose screen were further characterized by dose response curves. Transfections of JCV siRNAs for generation of dose response curves were performed with the following siRNA concentrations according to the above protocol:
[0211] from 33 nM in 3-fold dilutions down to 0.005 nM (for fragment L1)
[0212] from 24 nM in 4-fold dilutions down to 0.001 nM (for fragment E and fragments LA23 1-700 and LA23 701-1438).

[0213] IC50 values were determined by parameterized curve fitting using the program XLfit (IDBS, Guildford, Great Britain). Table 3 provides the results from two independent experiments for 32 selected JCV siRNAs. The mean IC50 from these two independent experiments is shown. Several JCV siRNAs (AD-12622, AD-12677, AD-12709, AD-12710, AD-12722, AD-12724, AD-12728, AD-12763, AD-12767, AD-12768, AD-12769, AD-12771, AD-12774, AD-12775, AD-12777, AD-12781, AD-12784, AD-12795, AD-12813, AD-12821, AD-12823, AD-12824, AD-12825, AD-12827, AD-12829, AD-12842) were particularly potent in this experimental paradigm, and exhibited IC50 values between 70 pM and 1 nM.

TABLE 3
IC50s

| | Mean IC50 |
|---|---|
| Duplex name | [nM] |
| AD-12599 | 2.37 |
| AD-12622 | 0.57 |
| AD-12666 | 3.7 |
| AD-12677 | 0.49 |
| AD-12709 | 0.19 |
| AD-12710 | 0.47 |
| AD-12712 | 2.33 |
| AD-12722 | 0.12 |
| AD-12724 | 0.26 |
| AD-12728 | 0.8 |
| AD-12761 | 1.2 |
| AD-12763 | 0.95 |
| AD-12767 | 0.09 |
| AD-12768 | 0.19 |
| AD-12769 | 0.35 |
| AD-12771 | 0.35 |
| AD-12774 | 0.13 |
| AD-12775 | 0.18 |
| AD-12777 | 0.17 |
| AD-12778 | 12.65 |
| AD-12781 | 0.18 |
| AD-12784 | 0.44 |
| AD-12795 | 0.65 |
| AD-12813 | 0.2 |
| AD-12818 | 1.88 |
| AD-12821 | 0.07 |
| AD-12823 | 0.46 |
| AD-12824 | 0.25 |
| AD-12825 | 0.52 |
| AD-12827 | 0.15 |
| AD-12829 | 0.14 |
| AD-12842 | 0.44 |

### Example 3

### Screen of JCV siRNAs Against Live JC Virus in SVG-A Cells

[0214] Cells and Virus

[0215] SVG-A cells (human fetal glial cells transformed by SV40 T antigen) obtained from Walter Atwood at Brown University were cultured in Eagle's Minimum Essential Media (ATCC, Manassas, Va.) supplemented to contain 10% fetal bovine serum (FBS) (Omega Scientific, Tarzana, Calif.), Penicillin 100 U/ml, Streptomycin 100 ug/ml (Invitrogen, Carlsbad Calif.) at 37° C. in an atmosphere with 5% CO₂ in a humidified incubator (Heraeus HERAcell, Thermo Electron Corporation, Ashville, N.C.). The Mad-1-SVEΔ strain of JCV obtained from Walter Atwood at Brown University was used in all experiments; viral stocks were prepared using SVG-A cells according to standard published methods (Liu and Atwood, Propagation and assay of the JC Virus, Methods Mol. Biol. 2001; 165:9-17).

[0216] Prophylaxis Assay

[0217] SVG-A cells were seeded on glass coverslips in 6-well dishes 24 hours prior to transfection in the media described above minus antibiotics. Cells were transfected with the indicated concentration of siRNA (10 nM, 50 nM, or 100 nM) using Lipofectamine™ 2000 according to the manufacturer's instructions (Invitrogen, Carlsbad, Calif.). Twenty-four hours post-transfection cells were washed with media containing 2% FBS and then infected with a 1:25 dilution of JCV virus stock (Mad-1-SVEΔ strain) diluted in 2% FBS media. Cells were rocked every 15 minutes by hand several times to get equal virus binding across the entire coverslip for one hour and then additional 10% FBS media was added and the infection was allowed to proceed for 72 hours. Seventy two hours post-infection, cells were fixed in acetone and stained for late viral protein (VP1) by standard immunofluoresence methods using hybridoma supernatant PAB597 recognizing JCV VP1 (obtained from Walter Atwood at Brown University) with goat anti-mouse Alexa Fluor 488 secondary antibody (Invitrogen, Carlsbad, Calif.). Infected cells were scored by counting VP1-immunoreactive cells using a fluorescence microscope (Zeiss, Imager.Z1, Thornwood, N.J.) and data were expressed as the percentage of infected cells counted for the control coverslips transfected with Luciferase siRNA. Table 4 shows the results of the prophylaxis assays at different siRNA concentrations (10 nM, 50 nM or 100 nM). The VP1 siRNAs were the most potent as a group, followed by the T antigen siRNAs, with the VP2/3 siRNAs being the least potent. The VP1 siRNAs most effective in reducing virus were consistently AD-12622, AD-12728, AD-12795, and AD-12842. The most potent T antigen siRNA was AD-12813.

TABLE 4
Prophylaxis Assay

| | | Remaining Virus (% | | |
|---|---|---|---|---|
| | Targeted | of Luciferase | | |
| Duplex | JCV | Control) | | |
| Number | Transcript | 50 nM | 10 nM | 100 nM |
| AD-12599 | VP1 | 79.9 | ND | ND |
| AD-12709 | VP1 | 46.0 | ND | ND |
| AD-12710 | VP1 | 25.9 | ND | ND |
| AD-12784 | VP1 | 30.9 | ND | ND |
| AD-12712 | VP1 | 29.7 | ND | ND |
| AD-12724 | VP1 | 30.5 | 38.9 | 25.8 |
| AD-12622 | VP1 | 22.9 | 28.2 | 9.1 |
| AD-12728 | VP1 | 21.1 | 22.2 | ND |
| AD-12795 | VP1 | 13.6 | 16.9 | 8.5 |
| AD-12842 | VP1 | 16.0 | 23.4 | 12.7 |
| AD-12761 | VP1 | 26.4 | 52.3 | ND |
| AD-12818 | VP1 | 24.0 | 50.2 | 28.0 |
| AD-12666 | VP1 | 54.1 | ND | ND |
| AD-12763 | VP1 | 39.5 | ND | ND |
| AD-12722 | T Antigen | 43.6 | 82.1 | ND |
| AD-12813 | T Antigen | 21.5 | 48.8 | 19.4 |
| AD-12767 | T Antigen | 37.6 | 52.2 | 30.9 |
| AD-12821 | T Antigen | 33.0 | 51.2 | 30.8 |
| AD-12774 | T Antigen | 74.0 | 89.2 | ND |
| AD-12827 | T Antigen | 77.0 | 92.0 | ND |
| AD-12775 | T Antigen | 81.6 | 95.4 | ND |
| AD-12777 | T Antigen | 73.3 | 93.9 | ND |
| AD-12829 | T Antigen | 78.6 | 93.6 | ND |
| AD-12781 | T Antigen | 38.8 | 62.6 | 34.4 |
| AD-12768 | VP2/3 | 73.9 | 92.4 | ND |
| AD-12771 | VP2/3 | 51.6 | 83.6 | ND |
| AD-12824 | VP2/3 | 42.1 | 79.0 | 43.7 |
| AD-12769 | VP2/3 | 35.2 | 78.0 | 39.7 |
| AD-12823 | VP2/3 | 38.1 | 78.1 | 42.0 |
| AD-12677 | VP2/3 | 99.1 | 102.1 | ND |
| AD-12825 | VP2/3 | 100.8 | 99.1 | ND |

ND indicates no data.

[0218] Post-Infection Treatment Assay

[0219] SVG-A cells were seeded on glass coverslips in 6-well dishes 24 hours prior to infection in 10% FBS media. Cells were washed with media containing 2% FBS and then infected with a 1:25 dilution of JCV virus stock diluted in 2% FBS media. Cells were rocked by hand approximately 8-10 times to get equal virus binding across the entire coverslip every 15 minutes for one hour and then additional 10% FBS media was added. Twenty-four and forty-eight hours postinfection, cells were washed with 10% FBS media containing no antibiotics and then transfected with 50 nM of the indicated siRNA using Lipofectamine™ 2000 according to the manufacturer's instructions (Invitrogen, Carlsbad, Calif.). Seventy-two hours postinfection, cells were fixed in acetone and stained for late viral protein (VP1) by standard immunofluoresence methods using hybridoma supernatant PAB597 recognizing JCV VP1 (obtained from Walter Atwood at Brown University) with goat anti-mouse Alexa Fluor 488 secondary antibody (Molecular Probes, Eugene, Oreg.). Infected cells were scored by counting VP1-immunoreactive cells using a fluorescence microscope (Zeiss, Imager.Z1, Thornwood, N.J.) and data were expressed as the percentage of infected cells counted for control coverslips transfected with Luciferase siRNA. Table 5 shows the results of the post-infection treatment experiments. All of the siRNAs tested in the treatment assay showed significant antiviral activity against JCV, such that the remaining virus was significantly less than that in the luciferase siRNA control.

TABLE 5
Treatment Assay

| | Targeted JCV | Remaining Virus (% of |
|---|---|---|
| Duplex Number | Transcript | Luciferase Control) |
| AD-12724 | VP1 | 38.9 |
| AD-12622 | VP1 | 28.2 |
| AD-12795 | VP1 | 16.9 |
| AD-12842 | VP1 | 23.4 |
| AD-12818 | VP1 | ND |
| AD-12813 | T Antigen | 48 |
| AD-12767 | T Antigen | 56.9 |
| AD-12821 | T Antigen | 75.8 |
| AD-12781 | T Antigen | 75.8 |
| AD-12824 | VP2/3 | 60.4 |
| AD-12769 | VP2/3 | 70.7 |
| AD-12823 | VP2/3 | 72.4 |

ND indicates no data.

### Example 4

### Prophylaxis Administration of JCV siRNAs Inhibits the Production of Active Progeny JC Virus

[0220] SVG-A cells were seeded in 6-well dishes 24 hours prior to transfection in the media described above minus antibiotics. Cells were transfected with 10 nM of the indicated siRNA using Lipofectamine™ 2000 according to the manufacturer's instructions (Invitrogen, Carlsbad, Calif.). Twenty-four hours post-transfection cells were washed with media containing 2% FBS and then infected with a 1:25 dilution of JCV virus stock (Mad-1-SVEΔ strain) diluted in 2% FBS media. Cells were rocked every 15 minutes by hand several times to get equal virus binding across the entire coverslip for one hour and then additional 10% FBS media was added and the infection was allowed to proceed for 6 days. Six days post-infection, progeny virus was collected either by removal of overlay media from infected cells or by scraping cells and performing virus preparations. The virus preparations consisted of scraping cells into the supernatant media, vortexing, freeze-thawing the re-suspended cells 2 times with vortexing in between, then spinning down the cell debris and taking the supernatant. Fresh SVG-A cells seeded on glass coverslips were infected secondarily with virus collected by either method using the same procedure done with the initial infection to determine the amount of infectious virus produced by cells transfected with the various siRNAs. At 72 hours post-infection of coverslips, cells were fixed in acetone and stained for late viral protein (VP1) by standard immunofluoresence methods using hybridoma supernatant PAB597 recognizing JCV VP1 (obtained from Walter Atwood at Brown University) with goat anti-mouse Alexa Fluor 488 secondary antibody (Invitrogen, Carlsbad, Calif.). Infected cells were scored by counting VP1-immunoreactive cells using a fluorescence microscope (Zeiss, Imager.Z1, Thornwood, N.J.) and data were expressed as the percentage of infected cells counted for the control coverslips transfected with Luciferase siRNA. Table 6 shows the results for selected siRNAs, demonstrating the ability of prophylaxis siRNA treatment to inhibit active progeny virus production by either method of virus collection. Transfection with siRNAs targeting VP1 (AD-12622 and AD-12842) had the greatest effect on inhibiting the production of active progeny virus regardless of whether virus was collected from media or from infected cell preparations. The T antigen siRNA AD-12813 had the next strongest inhibitory effect, whereas the VP2/3 siRNAs AD-12824 and AD-12769 still showed some albeit a lesser ability to inhibit active progeny JCV production.

TABLE 6
Prophylaxis administration of JCV siRNAs inhibits the production
of active progeny JC virus capable of secondary infection

Remaining
Virus (% of
Luciferase
Control)

| Duplex | Targeted | | Virus |
|---|---|---|---|
| Name | Transcript | Media | Preparation |
| AD-12622 | VP1 | 30.8 | 24.9 |
| AD-12842 | VP1 | 33.3 | 26.9 |
| AD-12813 | T Antigen | 57.8 | 38.7 |
| AD-12824 | VP2/3 | 83.6 | 57.6 |
| AD-12769 | VP2/3 | 79.1 | 52.2 |

### Example 5

### Stability in Cerebrospinal Fluid (CSF) of Selected siRNAs Targeting JCV

[0221] Eleven selected JCV siRNAs were tested for stability at 5 uM over 48 h at 37° C. in human CSF, as well as in PBS for comparison. 30 μl of human cerebrospinal fluid (CSF) was mixed with 3 μl of 50 μM duplex (siRNA) solution (150 pmole/well) in a 96-well plate, sealed to avoid evaporation and incubated for the indicated time at 37° C. Incubation of the siRNA in 30 ul PBS for 48 h served as a control for non-specific degradation. Reactions were stopped by the addition of 4 ul proteinase K (20 mg/ml) and 25 ul of proteinase K buffer, and an incubation for 20′ at 42° C. Samples were then spin filtered through a 0.2 μm 96 well filter plate at 3000 rpm for 20′. Incubation wells were washed with 50 ul Millipore water twice and the combined washing solutions were spin filtered also.

[0222] Samples were analyzed by ion exchange HPLC under denaturing conditions. Samples were transferred to single autosampler vials. IEX-HPLC analysis was performed under the following conditions: Dionex DNAPac PA200 (4×250 mm analytical column), temperature of 45° C. (denaturing conditions by pH=11), flow rate of 1 ml/min, injection volume of 50 ul, and detection wavelength of 260 nm with 1 nm bandwidth (reference wavelength 600 nm). In addition, the gradient conditions were as follows with HPLC Eluent A: 20 mM Na₃PO₄ in 10% ACN; pH=11 and HPLC Eluent B: 1 M NaBr in HPLC Eluent A:

| Time | % A | % B |
|---|---|---|
| 0.00 min | 75 | 25 |
| 1.00 min | 75 | 25 |
| 19.0 min | 38 | 62 |
| 19.5 min | 0 | 100 |
| 21.5 min | 0 | 100 |
| 22.0 min | 75 | 25 |
| 24.0 min | 75 | 25 |

[0223] Under the above denaturing IEX-HPLC conditions, the duplexes eluted as two separated single strands. All chromatograms were integrated automatically by the Dionex Chromeleon 6.60 HPLC software, and were adjusted manually as necessary. The area under the peak for each strand was calculated and the %-values for each intact full length product (FLP) for each time points were calculated by the following equation:

%-FLP_{(s/as; t=x)}=(PeakArea_{(s/as); t=x}/PeakArea_{(s/as); t=0min})*100%

All values were normalized to FLP at t=0 min. Table 7 provides the results after 48 hours of incubation in human CSF at 37° C. At least 75% of both antisense and sense strands of ten JCV siRNAs (AD-12622, AD-12724, AD-12767, AD-12769, AD-12795, AD-12813, AD-12818, AD-12823, AD-12824, AD-12842) were recovered, demonstrating that these siRNAs are highly stable in human CSF at 37° C. For AD-12821, 59% of the antisense and 97% of the sense strand was recovered after 48 h of incubation in human CSF at 37° C., showing that this siRNA has a half-life of greather than 48 h in human CSF at 37° C.

TABLE 7
Stability in human CSF

| | |
|---|---|
| | % full length |
| | material after |
| Duplex | 48 hours |

| name | antisense | sense |
|---|---|---|
| AD-12622 | 93 | 105 |
| AD-12724 | 90 | 106 |
| AD-12767 | 85 | 104 |
| AD-12769 | 100 | 104 |
| AD-12795 | 86 | 109 |
| AD-12813 | 94 | 98 |
| AD-12818 | 75 | 99 |
| AD-12821 | 59 | 97 |
| AD-12823 | 98 | 98 |
| AD-12824 | 84 | 98 |
| AD-12842 | 87 | 102 |

### Example 6

### In Vivo Down-Modulation of Endogenous CNP mRNA Levels by CNS Administration of Unconjugated CNP dsRNAs in Rats

[0224] Progressive multifocal leukoencephalopathy (PML) is a rapid and fatal demyelinating disease of the CNS that can occur in immunocompromised individuals. The human polyomavirus JCV has been identified as a causative agent for PML. The primary cell type infected by JCV is the oligodendrocyte. siRNAs targeting an endogenous oligodendrocyte gene (cyclic nucleotide phosphodiesterase; CNP) were used to show successful delivery of siRNAs in vivo into oligodendrocytes of normal rats. siRNAs targeting CNP and formulated in saline were infused into the rat corpus callosum where they robustly silenced the CNP gene. This silencing was durable, dose dependent, and mediated by an RNAi mechanism.

[0225] Male Sprague-Dawley rats were used in all studies (˜300 g body weight, Charles River Laboratory). Animal maintenance and surgical procedures were conducted in strict compliance with protocols approved by the Institutional Animal Care and Use Committee. Rats were anesthetized with a mixture of 0.5 ml/kg of ketamine (150 mg)/xylazine (30 mg)/acepromazine (5 mg), and placed into a stereotaxic frame (Benchmark™ Digital Stereotaxic, myNeurol.ab). Aseptic techniques were used throughout the surgical procedure. A burr hole was drilled in the rat skull, and a 30 gauge osmotic pump infusion cannula (Plastics One) was implanted into the right hemisphere, targeting the corpus callosum (stereotaxic coordinates AP 0.7, ML 2.2 and DV 3.0 relative to bregma; incisor bar 3.3 mm below the interaural line). Osmotic pumps (10 μl/hr flow rate, Alzet) containing PBS, control siRNA targeting luciferase AD-1955 (AS AL-3374: 5′-UCGAAGuACUcAGCGuAAGTsT-3′ (SEQ ID NO:2093), S AL-3372: 5′-cuuAcGcuGAGuAcuucGATsT-3′ (SEQ ID NO:2094)), or CNP siRNAs; AD-12436 (AS AL-20069: 5′-UCUCuAAGAGGUcAAGGCCTsT-3′ (SEQ ID NO:2095), S AL-20068: 5′-GGccuuGAccucuuAGAGATsT-3′ (SEQ ID NO:2096)), AD-12449 (AS AL-20095: 5′-cAAGGAAuAGAGCUUGCCCTsT-3′ (SEQ ID NO:2097), S AL-20094: 5′-GGGcAAGcucuAuuccuuGTsT-3′ (SEQ ID NO:2098)), AD-12441 (AS AL-20079: 5′-AUCUCuAAGAGGUcAAGGCTsT-3′ (SEQ ID NO:2099), S AL-20078: 5′-GccuuGAccucuuAGAGAuTsT-3′ (SEQ ID NO:2100)), AD-12438 (AS AL-20073: 5′-AAUCUCuAAGAGGUcAAGGTsT-3′ (SEQ ID NO:2101), S AL-20072: 5′-ccuuGAccucuuAGAGAuuTsT-3′ (SEQ ID NO:2102)) (see also Table 19) were primed in 0.9% saline overnight at 37° C. according to the manufacturer's instructions, and then connected to the cannula and implanted subcutaneously. All siRNAs were formulated in PBS. In the above sequences, lower case indicates 2′-O-Me modified nucleotides, and “s” indicates phosphorothioate linkages. siRNAs were generated by annealing equimolar amounts of complementary sense and antisense strands.

[0226] After 3-7 days of infusion, rats were euthanized and brains removed. Twelve coronal slices, each 1 mm thick, through the rat brain from anterior to posterior were obtained using a brain matrix (Braintree Scientific). The corpus callosum ipsilateral to the infusion was dissected from each slice and snap-frozen in liquid nitrogen for later mRNA measurement. The QuantiGene assay (Panomics) was used to quantify levels of CNP and myelin basic protein (MBP) mRNAs in rat corpus callosum after administration of siRNAs targeting CNP. Tissue lysates were directly used for CNP and MBP quantification, according to the manufacturer's instructions. CNP mRNA levels were normalized to MBP mRNA levels, and then further normalized to either PBS or control siRNA targeting luciferase (AD-1955).

[0227] Infusion into the rat corpus callosum of CNP siRNA AD-12436 formulated simply in PBS, resulted in a 75% reduction of CNP mRNA relative to MBP mRNA (used for normalization) detected by branched DNA analysis (FIG. 1A). An siRNA targeting the non-mammalian gene, luciferase (AD-1955), had no effect on CNP mRNA levels, as expected (FIG. 1A). The dose-response for CNP reduction demonstrated that maximal down-modulation was achieved with 0.56 mM CNP siRNA AD-12436 (FIG. 1B), whereas the threshold concentration for silencing was between 70 and 140 uM. CNP siRNAs AD-12449, AD-12441, and AD-12438 also significantly silenced the CNP mRNA by 56%, 59%, and 40% respectively after 7 days of continuous infusion at 0.56 mM.

[0228] RNAi effects have been reported in peripheral organs to persist for 1-4 weeks following termination of siRNA administration (Bartlett, D. W. and Davis, M. E., Biotechnol. Bioeng. (2007), 97: 909-21). To evaluate the durability of CNP silencing, AD-12436 was infused into the rat corpus callosum for 3 days, and then after recovery periods of 1, 3 or 7 days, CNP mRNA levels were evaluated. After a recovery period of 7 days, CNP mRNA levels continued to be suppressed, although the magnitude of down-modulation after a recovery period of 1 or 3 days was greater (FIG. 1C).

[0229] To confirm that silencing of the CNP mRNA was occurring by an RNAi mechanism 5′RACE analysis was performed. Total RNA extracted from corpus callosum tissue pooled from rats infused with AD-12436 or PBS (control) was ligated to GeneRacer Oligo (Invitrogen) without prior processing. Ligated mRNA was reverse transcribed into cDNA using a CNP specific primer 5′-CCACCTGCCTGTGTTGAGCTGAGTGTT-3′ (SEQ ID NO:2103). To detect cleavage product, PCR was performed using Platinum Taq Polymerase (Invitrogen) with the GeneRacer 5′ primer (Invitrogen) and CNP specific primer: 5′-CCACAGCGGTGGCACAGTGGCGTGAA-3′ (SEQ ID NO:2104). Amplification fragments were resolved on a 2% agarose gel and excised bands were cloned into pCR4-TOPO vector (Invitrogen) and confirmed by sequencing. We detected a band of the predicted size in tissue from AD-12436-treated but not control animals (FIG. 2). Sequencing of the excised band demonstrated that cleavage occurred at the predicted site within the CNP mRNA target region. This result suggested that the reduction in CNP mRNA levels seen following AD-12436 infusion was occurring via an RNAi mechanism.

[0230] In summary, dose dependent silencing of CNP that was durable for up to 7 days was achieved and was confirmed to be mediated by an RNAi mechanism. In view of these results, an siRNA targeting JCV offers significant promise for the effective inhibition of JCV replication in oligodendrocytes and for the treatment of PML.

[0231] These findings not only have broad implications for research studies, enabling the use of siRNAs to study the role of different molecular targets in oligodendrocytes in vivo, but also indicates that direct CNS administration of siRNA has clinical application for inhibiting pathogenic molecules in oligodendrocytes. These applications include demyelinating diseases such as PML, multiple sclerosis and leukodystrophy, as well as neurological disorders and injuries where axonal regeneration involving neuron-oligodendrocyte interactions and re-myelination represent therapeutic strategies.

### Example 7

### In Vivo Down-Modulation of Endogenous CNPase with AD-12436

[0232] dsRNA AD-12436 was administered to rats and primates as shown in FIGS. 3A and 3B, respectively.

[0233] Experiments in rats demonstrated that silencing by siCNP is dose-dependent (n=6 per group). Intraparenchymal infusion of siCNP into the corpus callosum of rats for three days at 7.5 mg/ml was performed (stereotaxic coordinates AP 0.7, ML 2.2 and DV 3.0 relative to bregma). Following animal sacrifice, 1 mm coronal sections of brain were cut from anterior to posterior, then corpus callosum tissue pieces were dissected for evaluation of CNP mRNA knockdown. Exemplary data is shown in FIG. 3A.

[0234] siCNP also demonstrated silencing of the oligodendrocyte target, CNP, in non-human primates (FIG. 3B). Intraparenchymal infusion of siCNP into the corona radiata resulted in robust silencing of CNP mRNA at the infusion site and in adjacent white matter tissue punches in both animals examined (#1, #2), compared to a naïve animal (Control).

### Example 8

### In Vivo Down-Modulation of Endogenous CNPase with AD-3222 and AD-3178

[0235] dsRNA AD-3222 and AD 3178 were administered to rats as shown in FIGS. 6A-6D.

[0236] Experiments in rats demonstrated that silencing by siCNP is dose-dependent (n=6 per group). Intraparenchymal, intrastriatial or intracortical convection enhanced delivery (CED) of siCNP into the corpus callosum or cortex of rats for three or seven days at a infusion rate of 10 μL/hr. Following animal sacrifice, 1 mm coronal sections of brain were cut from anterior to posterior, then corpus callosum tissue pieces were dissected for evaluation of CNP mRNA knockdown. Exemplary data is shown in FIGS. 6A-6D. According to FIGS. 6A and 6B, ˜26% maximum knockdown after CED of 0.6 mg/ml (0.43 mg) CNP siRNA AD-3178 into corpus callosum and ˜55% maximum knockdown after CED of 0.6 mg/ml (0.43 mg) CNP siRNA AD-3222 into corpus callosum. ˜64% maximum knockdown after CED of 1 mg/ml (0.72 mg) was observed with AD-3222 CNP siRNA into corpus callosum. ˜78% maximum knockdown after CED of 3 mg/ml (2.16 mg) AD-3222 CNP siRNA into corpus callosum. In addition, it was observed that S—S-cholesterol conjugated CNPase siRNA (AD-3222) produces better silencing of CNPase mRNA than regular cholesterol conjugated siRNA (AD-3178) (˜55% maximum knockdown at 0.6 mg/ml in S—S-cholesterol conjugated group and ˜26% maximum knockdown at 0.6 mg/ml in cholesterol conjugated group).

[0237] In a durability study of CNPase mRNA silencing after intraparenchymal CED at 1, 3 and 7 day washout (FIG. 6C), ˜68% (at 1 mg/ml) and ˜59% (at 0.6 mg/ml) maximum knockdown after 1 day washout, ˜38% (at 1 mg/ml) and ˜39% (at 0.6 mg/ml) maximum knockdown after 3 day washout. Therefore, durability of silencing induced by AD-3222 at either 1 mg/ml or 0.6 mg/ml is >3 days.

[0238] CNPase silencing with intrastriatal or intracortical CED infusion data (FIG. 6D) showed ˜67% (AD-3222 at 1 mg/ml) and ˜60% (AD-12436 at 7.5 mg/ml) maximum knockdown in the corpus callosum after 7 day intrastriatal infusion, ˜22% (AD-3222) and ˜19% (AD-12436) maximum knockdown in the corpus collosum after 7 day intracortical infusion, and ˜59% (AD-3222) and ˜53% (AD-12436) knockdown in the striatum after 7 day intrastriatal infusion. Thus, intrastriatial infusion of either unconjugated or S—S-Chol-conjugated CNPase siRNA (AD-3222) produces significant silencing in the corpus collosum (˜67% maximum knockdown at 1 mg/ml in S—S-cholesterol conjugated group (AD-3222), and ˜60% maximum knockdown at 7.5 mg/ml in unconjugated group (AD-12436)). In addition, intrastriatial infusion of either unconjugated or S—S-Chol-conjugated CNPase siRNA produces significant silencing in the striatum (˜59% maximum knockdown at 1 mg/ml in S—S-cholesterol conjugated group (AD-3222), and ˜53% maximum knockdown at 7.5 mg/ml in unconjugated group (AD-12436)).

### Example 9

### In Vivo Down-Modulation of Endogenous CNPase with AD-3569 and AD-3181

[0239] dsRNA AD-3569, AD-3181 and dicer substrate AD-18233 were administered to rats as shown in FIGS. 7A-7C.

[0240] Experiments in rats demonstrated that silencing by siCNP is dose-dependent (n=4-6 per group). Intraparenchymal convection enhanced delivery (CED) of siCNP into the corpus callosum or cortex of rats for three or seven days at a infusion rate of 10 μL/hr. Following animal sacrifice, 1 mm coronal sections of brain were cut from anterior to posterior, then corpus callosum tissue pieces were dissected for evaluation of CNP mRNA knockdown. Exemplary data is shown in FIGS. 7A-7C. According to FIG. 7A and FIG. 7B, ˜48% (AD-3181) and ˜41% (AD-3569) maximum knockdown in the corpus callosum at 3 mg/ml and ˜43% (AD-3181) and ˜16% (AD-3569) knockdown at 1 mg/ml. As shown in FIG. 7C, AD-3569 produces better silencing of CNPase mRNA than dicer substrate AD-18233 (˜50% maximum knockdown after CED of 3 mg/ml (2.16 mg) S—S-VitE conjugated CNP siRNA (AD-3569) into corpus callosum Versus ˜30% maximum knockdown after CED of 3 mg/ml (2.16 mg) Dicer CNP siRNA (AD-18233) into corpus callosum.

### Example 10

### Silencing Effect of Vitamin E Conjugates with Cleavable Disulfide Linkers

[0241] Vitamin E conjugated CNPase siRNA with non-cleavable linker (siCNP-VitE-1, 3 mg/ml), Vitamin E conjugate with disulfide linkers (siCNP-VitE-2, 0.3-3 mg/ml; siCNP-VitE-3, 3 mg/ml) or PBS was infused at 10 μl/hr over 3 days into the rat corpus callosum using an Alzet osmotic pump (2ML1). The QuantiGene assay was used to quantify levels of CNPase mRNA, normalized to myelin basic protein (MBP) mRNA in rat corpus callosum after administration of CNPase siRNA. Signals were further normalized to the PBS control group. N=4-5 per group.

[0242] At 3 mg/ml, the knockdown was comparable for the siCNP-VitE-1 with non-cleavable linker, AD-3569 and AD-18528 with cleavable disulfide linkers; the knockdown was also comparable for both disulfide constructs.

### Example 11

### VP1 siRNAs are More Potent Alone than when Combined at Half Doses with T Antigen siRNAs

[0243] A VP1 or T antigen siRNA either alone at 10 nM or in combination at 5 nM each were transfected into SVG cells. Twenty four hours post-transfection, cells were infected with JCV, and the infection was allowed to proceed for 72 hours. Cells were then fixed and stained for VP1 expression, and then scored by counting using a fluorescent microscope. The data as shown in FIG. 4 is expressed as the percentage of control infected cells transfected with Luciferase siRNAs. The silencing effect in combination is largely driven by the more potent VP1 siRNA.

### Example 12

### JCV siRNAs do not Induce IFN-α or TNF-α Release in a Human PBMC Assay

[0244] Human blood was obtained from two anonymous donors through a blood bank. Peripheral blood mononuclear cells (PBMCs) were isolated and transfected with 130 nM siRNA using GenePorter2 for IFN-α analysis and DOTAP for TNF-α analysis. Tissue culture supernatants were collected 24 h post-transfection, and cytokine levels were determined by ELISA. The data is summarized in FIGS. 5A and 5B. Control A and Control B represent two unrelated oligonucleotides that serve as positive controls.

TABLE 8

JCV Gene Walk. siRNAs targeting >95% of all strains
(>=369 out of 388). Human specific pan-JCV: 208 siRNAs;
all siRNAs double overhang design, dTdT, no modifications

| | | SEQ | | SEQ | |
|---|---|---|---|---|---|
| Position in | Duplex | ID | Sequence | ID | Sequence |
| Consensus | Name | NO: | (5′--> 3′) | NO: | (5′--> 3′) |
| 1533-1551 | AD-14742 | 515 | CUUAUAAGAGGAGGAGUAGTT | 516 | CUACUCCUCCUCUUAUAAGTT |
| 1703-1721 | AD-14743 | 517 | CAUGCUUCCUUGUUACAGUTT | 518 | ACUGUAACAAGGAAGCAUGTT |
| 1439-1457 | AD-14744 | 519 | UACGGGACUGUAACACCUGTT | 520 | CAGGUGUUACAGUCCCGUATT |
| 1705-1723 | AD-14745 | 521 | UGCUUCCUUGUUACAGUGUTT | 522 | ACACUGUAACAAGGAAGCATT |
| 2064-2082 | AD-14746 | 523 | CCUGUUGAAUGUUGGGUUCTT | 524 | GAACCCAACAUUCAACAGGTT |
| 2067-2085 | AD-14747 | 525 | GUUGAAUGUUGGGUUCCUGTT | 526 | CAGGAACCCAACAUUCAACTT |
| 2071-2089 | AD-14748 | 527 | AAUGUUGGGUUCCUGAUCCTT | 528 | GGAUCAGGAACCCAACAUUTT |
| 2121-2139 | AD-14749 | 529 | ACACUAACAGGAGGAGAAATT | 530 | UUUCUCCUCCUGUUAGUGUTT |
| 1535-1553 | AD-14750 | 531 | UAUAAGAGGAGGAGUAGAATT | 532 | UUCUACUCCUCCUCUUAUATT |
| 1536-1554 | AD-14751 | 533 | AUAAGAGGAGGAGUAGAAGTT | 534 | CUUCUACUCCUCCUCUUAUTT |
| 1445-1463 | AD-14752 | 535 | ACUGUAACACCUGCUCUUGTT | 536 | CAAGAGCAGGUGUUACAGUTT |
| 1700-1718 | AD-14753 | 537 | GGACAUGCUUCCUUGUUACTT | 538 | GUAACAAGGAAGCAUGUCCTT |
| 1702-1720 | AD-14754 | 539 | ACAUGCUUCCUUGUUACAGTT | 540 | CUGUAACAAGGAAGCAUGUTT |
| 1704-1722 | AD-14755 | 541 | AUGCUUCCUUGUUACAGUGTT | 542 | CACUGUAACAAGGAAGCAUTT |
| 2065-2083 | AD-14756 | 543 | CUGUUGAAUGUUGGGUUCCTT | 544 | GGAACCCAACAUUCAACAGTT |
| 2070-2088 | AD-14757 | 545 | GAAUGUUGGGUUCCUGAUCTT | 546 | GAUCAGGAACCCAACAUUCTT |
| 1441-1459 | AD-14758 | 547 | CGGGACUGUAACACCUGCUTT | 548 | AGCAGGUGUUACAGUCCCGTT |
| 1443-1461 | AD-14759 | 549 | GGACUGUAACACCUGCUCUTT | 550 | AGAGCAGGUGUUACAGUCCTT |
| 1444-1462 | AD-14760 | 551 | GACUGUAACACCUGCUCUUTT | 552 | AAGAGCAGGUGUUACAGUCTT |
| 1609-1627 | AD-14761 | 553 | CUCCAGAAAUGGGUGACCCTT | 554 | GGGUCACCCAUUUCUGGAGTT |
| 1537-1555 | AD-14762 | 555 | UAAGAGGAGGAGUAGAAGUTT | 556 | ACUUCUACUCCUCCUCUUATT |
| 629-647 | AD-14763 | 557 | GAGGCUGCUGCUACUAUAGTT | 558 | CUAUAGUAGCAGCAGCCUCTT |
| 656-674 | AD-14764 | 559 | AUUGCAUCCCUUGCUACUGTT | 560 | CAGUAGCAAGGGAUGCAAUTT |
| 658-676 | AD-14765 | 561 | UGCAUCCCUUGCUACUGUATT | 562 | UACAGUAGCAAGGGAUGCATT |
| 517-535 | AD-14766 | 563 | UUGUGUUUUCAGGUUCAUGTT | 564 | CAUGAACCUGAAAACACAATT |
| 559-577 | AD-14767 | 565 | GGACCUAGUUGCUACUGUUTT | 566 | AACAGUAGCAACUAGGUCCTT |
| 591-609 | AD-14768 | 567 | CUGCCACAGGAUUUUCAGUTT | 568 | ACUGAAAAUCCUGUGGCAGTT |
| 638-656 | AD-14769 | 569 | GCUACUAUAGAAGUUGAAATT | 570 | UUUCAACUUCUAUAGUAGCTT |
| 655-673 | AD-14770 | 571 | AAUUGCAUCCCUUGCUACUTT | 572 | AGUAGCAAGGGAUGCAAUUTT |
| 561-579 | AD-14771 | 573 | ACCUAGUUGCUACUGUUUCTT | 574 | GAAACAGUAGCAACUAGGUTT |
| 639-657 | AD-14772 | 575 | CUACUAUAGAAGUUGAAAUTT | 576 | AUUUCAACUUCUAUAGUAGTT |
| 715-733 | AD-14773 | 577 | AGGCCUUACUCCUGAAACATT | 578 | UGUUUCAGGAGUAAGGCCUTT |
| 716-734 | AD-14774 | 579 | GGCCUUACUCCUGAAACAUTT | 580 | AUGUUUCAGGAGUAAGGCCTT |
| 326-344 | AD-14775 | 581 | GUAAAACCUGGAGUGGAACTT | 582 | GUUCCACUCCAGGUUUUACTT |
| 518-536 | AD-14776 | 583 | UGUGUUUUCAGGUUCAUGGTT | 584 | CCAUGAACCUGAAAACACATT |
| 520-538 | AD-14777 | 585 | UGUUUUCAGGUUCAUGGGUTT | 586 | ACCCAUGAACCUGAAAACATT |
| 661-679 | AD-14778 | 587 | AUCCCUUGCUACUGUAGAGTT | 588 | CUCUACAGUAGCAAGGGAUTT |
| 560-578 | AD-14779 | 589 | GACCUAGUUGCUACUGUUUTT | 590 | AAACAGUAGCAACUAGGUCTT |
| 681-699 | AD-14780 | 591 | GGAUUACAAGUACCUCUGATT | 592 | UCAGAGGUACUUGUAAUCCTT |
| 714-732 | AD-14781 | 593 | UAGGCCUUACUCCUGAAACTT | 594 | GUUUCAGGAGUAAGGCCUATT |
| 377-395 | AD-14782 | 595 | UGUUAGAAUUUUUGCUGGATT | 596 | UCCAGCAAAAAUUCUAACATT |
| 589-607 | AD-14783 | 597 | UGCUGCCACAGGAUUUUCATT | 598 | UGAAAAUCCUGUGGCAGCATT |
| 594-612 | AD-14784 | 599 | CCACAGGAUUUUCAGUAGCTT | 600 | GCUACUGAAAAUCCUGUGGTT |
| 648-666 | AD-14785 | 601 | AAGUUGAAAUUGCAUCCCUTT | 602 | AGGGAUGCAAUUUCAACUUTT |
| 649-667 | AD-14786 | 603 | AGUUGAAAUUGCAUCCCUUTT | 604 | AAGGGAUGCAAUUUCAACUTT |
| 587-605 | AD-14787 | 605 | GCUGCUGCCACAGGAUUUUTT | 606 | AAAAUCCUGUGGCAGCAGCTT |
| 325-343 | AD-14788 | 607 | AGUAAAACCUGGAGUGGAATT | 608 | UUCCACUCCAGGUUUUACUTT |
| 515-533 | AD-14789 | 609 | UUUUGUGUUUUCAGGUUCATT | 610 | UGAACCUGAAAACACAAAATT |
| 516-534 | AD-14790 | 611 | UUUGUGUUUUCAGGUUCAUTT | 612 | AUGAACCUGAAAACACAAATT |
| 519-537 | AD-14791 | 613 | GUGUUUUCAGGUUCAUGGGTT | 614 | CCCAUGAACCUGAAAACACTT |
| 521-539 | AD-14792 | 615 | GUUUUCAGGUUCAUGGGUGTT | 616 | CACCCAUGAACCUGAAAACTT |
| 522-540 | AD-14793 | 617 | UUUUCAGGUUCAUGGGUGCTT | 618 | GCACCCAUGAACCUGAAAATT |
| 523-541 | AD-14794 | 619 | UUUCAGGUUCAUGGGUGCCTT | 620 | GGCACCCAUGAACCUGAAATT |
| 616-634 | AD-14795 | 621 | AAUUGCUGCUGGAGAGGCUTT | 622 | AGCCUCUCCAGCAGCAAUUTT |
| 657-675 | AD-14796 | 623 | UUGCAUCCCUUGCUACUGUTT | 624 | ACAGUAGCAAGGGAUGCAATT |
| 761-779 | AD-14797 | 625 | GCUGUAGCUGGGUUUGCUGTT | 626 | CAGCAAACCCAGCUACAGCTT |
| 645-663 | AD-14798 | 627 | UAGAAGUUGAAAUUGCAUCTT | 628 | GAUGCAAUUUCAACUUCUATT |
| 647-665 | AD-14799 | 629 | GAAGUUGAAAUUGCAUCCCTT | 630 | GGGAUGCAAUUUCAACUUCTT |
| 660-678 | AD-14800 | 631 | CAUCCCUUGCUACUGUAGATT | 632 | UCUACAGUAGCAAGGGAUGTT |
| 324-342 | AD-14801 | 633 | UAGUAAAACCUGGAGUGGATT | 634 | UCCACUCCAGGUUUUACUATT |
| 372-390 | AD-14802 | 635 | UUUUUUGUUAGAAUUUUUGTT | 636 | CAAAAAUUCUAACAAAAAATT |
| 640-658 | AD-14803 | 637 | UACUAUAGAAGUUGAAAUUTT | 638 | AAUUUCAACUUCUAUAGUATT |
| 562-580 | AD-14804 | 639 | CCUAGUUGCUACUGUUUCUTT | 640 | AGAAACAGUAGCAACUAGGTT |
| 563-581 | AD-14805 | 641 | CUAGUUGCUACUGUUUCUGTT | 642 | CAGAAACAGUAGCAACUAGTT |
| 566-584 | AD-14806 | 643 | GUUGCUACUGUUUCUGAGGTT | 644 | CCUCAGAAACAGUAGCAACTT |
| 625-643 | AD-14807 | 645 | UGGAGAGGCUGCUGCUACUTT | 646 | AGUAGCAGCAGCCUCUCCATT |
| 627-645 | AD-14808 | 647 | GAGAGGCUGCUGCUACUAUTT | 648 | AUAGUAGCAGCAGCCUCUCTT |
| 628-646 | AD-14809 | 649 | AGAGGCUGCUGCUACUAUATT | 650 | UAUAGUAGCAGCAGCCUCUTT |
| 632-650 | AD-14810 | 651 | GCUGCUGCUACUAUAGAAGTT | 652 | CUUCUAUAGUAGCAGCAGCTT |
| 513-531 | AD-14811 | 653 | UUUUUUGUGUUUUCAGGUUTT | 654 | AACCUGAAAACACAAAAAATT |
| 641-659 | AD-14812 | 655 | ACUAUAGAAGUUGAAAUUGTT | 656 | CAAUUUCAACUUCUAUAGUTT |
| 323-341 | AD-14813 | 657 | UUAGUAAAACCUGGAGUGGTT | 658 | CCACUCCAGGUUUUACUAATT |
| 717-735 | AD-14814 | 659 | GCCUUACUCCUGAAACAUATT | 660 | UAUGUUUCAGGAGUAAGGCTT |
| 646-664 | AD-14815 | 661 | AGAAGUUGAAAUUGCAUCCTT | 662 | GGAUGCAAUUUCAACUUCUTT |
| 592-610 | AD-14816 | 663 | UGCCACAGGAUUUUCAGUATT | 664 | UACUGAAAAUCCUGUGGCATT |
| 590-608 | AD-14817 | 665 | GCUGCCACAGGAUUUUCAGTT | 666 | CUGAAAAUCCUGUGGCAGCTT |
| 526-544 | AD-14818 | 667 | CAGGUUCAUGGGUGCCGCATT | 668 | UGCGGCACCCAUGAACCUGTT |
| 615-633 | AD-14819 | 669 | AAAUUGCUGCUGGAGAGGCTT | 670 | GCCUCUCCAGCAGCAAUUUTT |
| 617-635 | AD-14820 | 671 | AUUGCUGCUGGAGAGGCUGTT | 672 | CAGCCUCUCCAGCAGCAAUTT |
| 652-670 | AD-14821 | 673 | UGAAAUUGCAUCCCUUGCUTT | 674 | AGCAAGGGAUGCAAUUUCATT |
| 374-392 | AD-14822 | 675 | UUUUGUUAGAAUUUUUGCUTT | 676 | AGCAAAAAUUCUAACAAAATT |
| 375-393 | AD-14823 | 677 | UUUGUUAGAAUUUUUGCUGTT | 678 | CAGCAAAAAUUCUAACAAATT |
| 631-649 | AD-14824 | 679 | GGCUGCUGCUACUAUAGAATT | 680 | UUCUAUAGUAGCAGCAGCCTT |
| 376-394 | AD-14825 | 681 | UUGUUAGAAUUUUUGCUGGTT | 682 | CCAGCAAAAAUUCUAACAATT |
| 512-530 | AD-14826 | 683 | UUUUUUUGUGUUUUCAGGUTT | 684 | ACCUGAAAACACAAAAAAATT |
| 1127-1145 | AD-14827 | 685 | GAAACUACUUGGGCAAUAGTT | 686 | CUAUUGCCCAAGUAGUUUCTT |
| 1410-1428 | AD-14828 | 687 | AAUGGAUGUUGCCUUUACUTT | 688 | AGUAAAGGCAACAUCCAUUTT |
| 1406-1424 | AD-14829 | 689 | CCUCAAUGGAUGUUGCCUUTT | 690 | AAGGCAACAUCCAUUGAGGTT |
| 1418-1436 | AD-14830 | 691 | UUGCCUUUACUUUUAGGGUTT | 692 | ACCCUAAAAGUAAAGGCAATT |
| 1126-1144 | AD-14831 | 693 | AGAAACUACUUGGGCAAUATT | 694 | UAUUGCCCAAGUAGUUUCUTT |
| 1125-1143 | AD-14832 | 695 | AAGAAACUACUUGGGCAAUTT | 696 | AUUGCCCAAGUAGUUUCUUTT |
| 1419-1437 | AD-14833 | 697 | UGCCUUUACUUUUAGGGUUTT | 698 | AACCCUAAAAGUAAAGGCATT |
| 1420-1438 | AD-14834 | 699 | GCCUUUACUUUUAGGGUUGTT | 700 | CAACCCUAAAAGUAAAGGCTT |
| 1422-1440 | AD-14835 | 701 | CUUUACUUUUAGGGUUGUATT | 702 | UACAACCCUAAAAGUAAAGTT |
| 1423-1441 | AD-14836 | 703 | UUUACUUUUAGGGUUGUACTT | 704 | GUACAACCCUAAAAGUAAATT |
| 1425-1443 | AD-14837 | 705 | UACUUUUAGGGUUGUACGGTT | 706 | CCGUACAACCCUAAAAGUATT |
| 1123-1141 | AD-14838 | 707 | GGAAGAAACUACUUGGGCATT | 708 | UGCCCAAGUAGUUUCUUCCTT |
| 1409-1427 | AD-14839 | 709 | CAAUGGAUGUUGCCUUUACTT | 710 | GUAAAGGCAACAUCCAUUGTT |
| 1413-1431 | AD-14840 | 711 | GGAUGUUGCCUUUACUUUUTT | 712 | AAAAGUAAAGGCAACAUCCTT |
| 1416-1434 | AD-14841 | 713 | UGUUGCCUUUACUUUUAGGTT | 714 | CCUAAAAGUAAAGGCAACATT |
| 1414-1432 | AD-14842 | 715 | GAUGUUGCCUUUACUUUUATT | 716 | UAAAAGUAAAGGCAACAUCTT |
| 911-929 | AD-14843 | 717 | CCAGAAGACUACUAUGAUATT | 718 | UAUCAUAGUAGUCUUCUGGTT |
| 910-928 | AD-14844 | 719 | UCCAGAAGACUACUAUGAUTT | 720 | AUCAUAGUAGUCUUCUGGATT |
| 1120-1138 | AD-14845 | 721 | UUUGGAAGAAACUACUUGGTT | 722 | CCAAGUAGUUUCUUCCAAATT |
| 1404-1422 | AD-14846 | 723 | CUCCUCAAUGGAUGUUGCCTT | 724 | GGCAACAUCCAUUGAGGAGTT |
| 1337-1355 | AD-14847 | 725 | CCAAAUGUGCAAUCUGGUGTT | 726 | CACCAGAUUGCACAUUUGGTT |
| 1338-1356 | AD-14848 | 727 | CAAAUGUGCAAUCUGGUGATT | 728 | UCACCAGAUUGCACAUUUGTT |
| 1397-1415 | AD-14849 | 729 | AGAUCUGCUCCUCAAUGGATT | 730 | UCCAUUGAGGAGCAGAUCUTT |
| 1407-1425 | AD-14850 | 731 | CUCAAUGGAUGUUGCCUUUTT | 732 | AAAGGCAACAUCCAUUGAGTT |
| 4157-4175 | AD-14851 | 733 | GCUCAAAUUUUAUAUAAGATT | 734 | UCUUAUAUAAAAUUUGAGCTT |
| 4795-4813 | AD-14852 | 735 | AGCCUGAUUUUGGUACAUGTT | 736 | CAUGUACCAAAAUCAGGCUTT |
| 4156-4174 | AD-14853 | 737 | CUCAAAUUUUAUAUAAGAATT | 738 | UUCUUAUAUAAAAUUUGAGTT |
| 5002-5020 | AD-14854 | 739 | ACAAAGUGCUGAAUAGGGATT | 740 | UCCCUAUUCAGCACUUUGUTT |
| 4792-4810 | AD-14855 | 741 | CUGAUUUUGGUACAUGGAATT | 742 | UUCCAUGUACCAAAAUCAGTT |
| 4790-4808 | AD-14856 | 743 | GAUUUUGGUACAUGGAAUATT | 744 | UAUUCCAUGUACCAAAAUCTT |
| 4801-4819 | AD-14857 | 745 | CUCAUCAGCCUGAUUUUGGTT | 746 | CCAAAAUCAGGCUGAUGAGTT |
| 4622-4640 | AD-14858 | 747 | AGCCCACUUGUGUGGAUAGTT | 748 | CUAUCCACACAAGUGGGCUTT |
| 4997-5015 | AD-14859 | 749 | GUGCUGAAUAGGGAGGAAUTT | 750 | AUUCCUCCCUAUUCAGCACTT |
| 5094-5112 | AD-14860 | 751 | AGUAAGGGCGUGGAGGCUUTT | 752 | AAGCCUCCACGCCCUUACUTT |
| 4564-4582 | AD-14861 | 753 | GUGACUUAACCCAAGAAGCTT | 754 | GCUUCUUGGGUUAAGUCACTT |
| 5095-5113 | AD-14862 | 755 | UAGUAAGGGCGUGGAGGCUTT | 756 | AGCCUCCACGCCCUUACUATT |
| 4800-4818 | AD-14863 | 757 | UCAUCAGCCUGAUUUUGGUTT | 758 | ACCAAAAUCAGGCUGAUGATT |
| 4265-4283 | AD-14864 | 759 | GUAGAAGACCCUAAAGACUTT | 760 | AGUCUUUAGGGUCUUCUACTT |
| 4267-4285 | AD-14865 | 761 | AGGUAGAAGACCCUAAAGATT | 762 | UCUUUAGGGUCUUCUACCUTT |
| 4270-4288 | AD-14866 | 763 | AAAAGGUAGAAGACCCUAATT | 764 | UUAGGGUCUUCUACCUUUUTT |
| 4269-4287 | AD-14867 | 765 | AAAGGUAGAAGACCCUAAATT | 766 | UUUAGGGUCUUCUACCUUUTT |
| 2874-2892 | AD-14868 | 767 | GAUUGUGCAGUGGAAAGAATT | 768 | UUCUUUCCACUGCACAAUCTT |
| 2875-2893 | AD-14869 | 769 | GGAUUGUGCAGUGGAAAGATT | 770 | UCUUUCCACUGCACAAUCCTT |
| 3950-3968 | AD-14870 | 771 | UGUAGACAGCCAUAUGCAGTT | 772 | CUGCAUAUGGCUGUCUACATT |
| 3896-3914 | AD-14871 | 773 | CAUGACUUUAACCCAGAAGTT | 774 | CUUCUGGGUUAAAGUCAUGTT |
| 4990-5008 | AD-14872 | 775 | AUAGGGAGGAAUCCAUGGATT | 776 | UCCAUGGAUUCCUCCCUAUTT |
| 4994-5012 | AD-14873 | 777 | CUGAAUAGGGAGGAAUCCATT | 778 | UGGAUUCCUCCCUAUUCAGTT |
| 5000-5018 | AD-14874 | 779 | AAAGUGCUGAAUAGGGAGGTT | 780 | CCUCCCUAUUCAGCACUUUTT |
| 4563-4581 | AD-14875 | 781 | UGACUUAACCCAAGAAGCUTT | 782 | AGCUUCUUGGGUUAAGUCATT |
| 3895-3913 | AD-14876 | 783 | AUGACUUUAACCCAGAAGATT | 784 | UCUUCUGGGUUAAAGUCAUTT |
| 4262-4280 | AD-14877 | 785 | GAAGACCCUAAAGACUUUCTT | 786 | GAAAGUCUUUAGGGUCUUCTT |
| 4162-4180 | AD-14878 | 787 | AAAAAGCUCAAAUUUUAUATT | 788 | UAUAAAAUUUGAGCUUUUUTT |
| 4798-4816 | AD-14879 | 789 | AUCAGCCUGAUUUUGGUACTT | 790 | GUACCAAAAUCAGGCUGAUTT |
| 4799-4817 | AD-14880 | 791 | CAUCAGCCUGAUUUUGGUATT | 792 | UACCAAAAUCAGGCUGAUGTT |
| 5006-5024 | AD-14881 | 793 | AUGGACAAAGUGCUGAAUATT | 794 | UAUUCAGCACUUUGUCCAUTT |
| 4264-4282 | AD-14882 | 795 | UAGAAGACCCUAAAGACUUTT | 796 | AAGUCUUUAGGGUCUUCUATT |
| 4268-4286 | AD-14883 | 797 | AAGGUAGAAGACCCUAAAGTT | 798 | CUUUAGGGUCUUCUACCUUTT |
| 4623-4641 | AD-14884 | 799 | CAGCCCACUUGUGUGGAUATT | 800 | UAUCCACACAAGUGGGCUGTT |
| 4788-4806 | AD-14885 | 801 | UUUUGGUACAUGGAAUAGUTT | 802 | ACUAUUCCAUGUACCAAAATT |
| 4993-5011 | AD-14886 | 803 | UGAAUAGGGAGGAAUCCAUTT | 804 | AUGGAUUCCUCCCUAUUCATT |
| 4995-5013 | AD-14887 | 805 | GCUGAAUAGGGAGGAAUCCTT | 806 | GGAUUCCUCCCUAUUCAGCTT |
| 4996-5014 | AD-14888 | 807 | UGCUGAAUAGGGAGGAAUCTT | 808 | GAUUCCUCCCUAUUCAGCATT |
| 3952-3970 | AD-14889 | 809 | UGUGUAGACAGCCAUAUGCTT | 810 | GCAUAUGGCUGUCUACACATT |
| 4595-4613 | AD-14890 | 811 | UGCUUUGAUUGCUUCAGACTT | 812 | GUCUGAAGCAAUCAAAGCATT |
| 4596-4614 | AD-14891 | 813 | UUGCUUUGAUUGCUUCAGATT | 814 | UCUGAAGCAAUCAAAGCAATT |
| 4597-4615 | AD-14892 | 815 | AUUGCUUUGAUUGCUUCAGTT | 816 | CUGAAGCAAUCAAAGCAAUTT |
| 4599-4617 | AD-14893 | 817 | CUAUUGCUUUGAUUGCUUCTT | 818 | GAAGCAAUCAAAGCAAUAGTT |
| 4726-4744 | AD-14894 | 819 | AUUGCAAGGAAUGGCCUAATT | 820 | UUAGGCCAUUCCUUGCAAUTT |
| 4753-4771 | AD-14895 | 821 | AUUUUCCUCCUAAUUCUGATT | 822 | UCAGAAUUAGGAGGAAAAUTT |
| 4802-4820 | AD-14896 | 823 | GCUCAUCAGCCUGAUUUUGTT | 824 | CAAAAUCAGGCUGAUGAGCTT |
| 4803-4821 | AD-14897 | 825 | UGCUCAUCAGCCUGAUUUUTT | 826 | AAAAUCAGGCUGAUGAGCATT |
| 4806-4824 | AD-14898 | 827 | AGUUGCUCAUCAGCCUGAUTT | 828 | AUCAGGCUGAUGAGCAACUTT |
| 5091-5109 | AD-14899 | 829 | AAGGGCGUGGAGGCUUUUUTT | 830 | AAAAAGCCUCCACGCCCUUTT |
| 5093-5111 | AD-14900 | 831 | GUAAGGGCGUGGAGGCUUUTT | 832 | AAAGCCUCCACGCCCUUACTT |
| 4259-4277 | AD-14901 | 833 | GACCCUAAAGACUUUCCUGTT | 834 | CAGGAAAGUCUUUAGGGUCTT |
| 3901-3919 | AD-14902 | 835 | AGGAGCAUGACUUUAACCCTT | 836 | GGGUUAAAGUCAUGCUCCUTT |
| 4757-4775 | AD-14903 | 837 | UGUGAUUUUCCUCCUAAUUTT | 838 | AAUUAGGAGGAAAAUCACATT |
| 4758-4776 | AD-14904 | 839 | UUGUGAUUUUCCUCCUAAUTT | 840 | AUUAGGAGGAAAAUCACAATT |
| 4562-4580 | AD-14905 | 841 | GACUUAACCCAAGAAGCUCTT | 842 | GAGCUUCUUGGGUUAAGUCTT |
| 4585-4603 | AD-14906 | 843 | GCUUCAGACAAUGGUUUGGTT | 844 | CCAAACCAUUGUCUGAAGCTT |
| 4587-4605 | AD-14907 | 845 | UUGCUUCAGACAAUGGUUUTT | 846 | AAACCAUUGUCUGAAGCAATT |
| 4588-4606 | AD-14908 | 847 | AUUGCUUCAGACAAUGGUUTT | 848 | AACCAUUGUCUGAAGCAAUTT |
| 4591-4609 | AD-14909 | 849 | UUGAUUGCUUCAGACAAUGTT | 850 | CAUUGUCUGAAGCAAUCAATT |
| 5003-5021 | AD-14910 | 851 | GACAAAGUGCUGAAUAGGGTT | 852 | CCCUAUUCAGCACUUUGUCTT |
| 4165-4183 | AD-14911 | 853 | AAGAAAAAGCUCAAAUUUUTT | 854 | AAAAUUUGAGCUUUUUCUUTT |
| 4166-4184 | AD-14912 | 855 | AAAGAAAAAGCUCAAAUUUTT | 856 | AAAUUUGAGCUUUUUCUUUTT |
| 4263-4281 | AD-14913 | 857 | AGAAGACCCUAAAGACUUUTT | 858 | AAAGUCUUUAGGGUCUUCUTT |
| 4274-4292 | AD-14914 | 859 | AAAAAAAAGGUAGAAGACCTT | 860 | GGUCUUCUACCUUUUUUUUTT |
| 4266-4284 | AD-14915 | 861 | GGUAGAAGACCCUAAAGACTT | 862 | GUCUUUAGGGUCUUCUACCTT |
| 4272-4290 | AD-14916 | 863 | AAAAAAGGUAGAAGACCCUTT | 864 | AGGGUCUUCUACCUUUUUUTT |
| 4271-4289 | AD-14917 | 865 | AAAAAGGUAGAAGACCCUATT | 866 | UAGGGUCUUCUACCUUUUUTT |
| 4559-4577 | AD-14918 | 867 | UUAACCCAAGAAGCUCUUCTT | 868 | GAAGAGCUUCUUGGGUUAATT |
| 4789-4807 | AD-14919 | 869 | AUUUUGGUACAUGGAAUAGTT | 870 | CUAUUCCAUGUACCAAAAUTT |
| 4998-5016 | AD-14920 | 871 | AGUGCUGAAUAGGGAGGAATT | 872 | UUCCUCCCUAUUCAGCACUTT |
| 5070-5088 | AD-14921 | 873 | GAGGCCAGGGAAAUUCCCUTT | 874 | AGGGAAUUUCCCUGGCCUCTT |
| 4158-4176 | AD-14922 | 875 | AGCUCAAAUUUUAUAUAAGTT | 876 | CUUAUAUAAAAUUUGAGCUTT |
| 5065-5083 | AD-14923 | 877 | CAGGGAAAUUCCCUUGUUUTT | 878 | AAACAAGGGAAUUUCCCUGTT |
| 2872-2890 | AD-14924 | 879 | UUGUGCAGUGGAAAGAAAGTT | 880 | CUUUCUUUCCACUGCACAATT |
| 4782-4800 | AD-14925 | 881 | UACAUGGAAUAGUUCAGAGTT | 882 | CUCUGAACUAUUCCAUGUATT |
| 4783-4801 | AD-14926 | 883 | GUACAUGGAAUAGUUCAGATT | 884 | UCUGAACUAUUCCAUGUACTT |
| 5064-5082 | AD-14927 | 885 | AGGGAAAUUCCCUUGUUUUTT | 886 | AAAACAAGGGAAUUUCCCUTT |
| 5071-5089 | AD-14928 | 887 | GGAGGCCAGGGAAAUUCCCTT | 888 | GGGAAUUUCCCUGGCCUCCTT |
| 3951-3969 | AD-14929 | 889 | GUGUAGACAGCCAUAUGCATT | 890 | UGCAUAUGGCUGUCUACACTT |
| 3949-3967 | AD-14930 | 891 | GUAGACAGCCAUAUGCAGUTT | 892 | ACUGCAUAUGGCUGUCUACTT |
| 4355-4373 | AD-14931 | 893 | GAAGACCUGUUUUGCCAUGTT | 894 | CAUGGCAAAACAGGUCUUCTT |
| 4363-4381 | AD-14932 | 895 | AGUGGGAUGAAGACCUGUUTT | 896 | AACAGGUCUUCAUCCCACUTT |
| 4356-4374 | AD-14933 | 897 | UGAAGACCUGUUUUGCCAUTT | 898 | AUGGCAAAACAGGUCUUCATT |
| 4361-4379 | AD-14934 | 899 | UGGGAUGAAGACCUGUUUUTT | 900 | AAAACAGGUCUUCAUCCCATT |
| 4560-4578 | AD-14935 | 901 | CUUAACCCAAGAAGCUCUUTT | 902 | AAGAGCUUCUUGGGUUAAGTT |
| 2873-2891 | AD-14936 | 903 | AUUGUGCAGUGGAAAGAAATT | 904 | UUUCUUUCCACUGCACAAUTT |
| 4730-4748 | AD-14937 | 905 | CUUUAUUGCAAGGAAUGGCTT | 906 | GCCAUUCCUUGCAAUAAAGTT |
| 3899-3917 | AD-14938 | 907 | GAGCAUGACUUUAACCCAGTT | 908 | CUGGGUUAAAGUCAUGCUCTT |
| 4756-4774 | AD-14939 | 909 | GUGAUUUUCCUCCUAAUUCTT | 910 | GAAUUAGGAGGAAAAUCACTT |
| 4590-4608 | AD-14940 | 911 | UGAUUGCUUCAGACAAUGGTT | 912 | CCAUUGUCUGAAGCAAUCATT |
| 4159-4177 | AD-14941 | 913 | AAGCUCAAAUUUUAUAUAATT | 914 | UUAUAUAAAAUUUGAGCUUTT |
| 2743-2761 | AD-14942 | 915 | CUGGACAUGGAUCAAGCACTT | 916 | GUGCUUGAUCCAUGUCCAGTT |
| 4155-4173 | AD-14943 | 917 | UCAAAUUUUAUAUAAGAAATT | 918 | UUUCUUAUAUAAAAUUUGATT |
| 2871-2889 | AD-14944 | 919 | UGUGCAGUGGAAAGAAAGGTT | 920 | CCUUUCUUUCCACUGCACATT |
| 4786-4804 | AD-14945 | 921 | UUGGUACAUGGAAUAGUUCTT | 922 | GAACUAUUCCAUGUACCAATT |
| 4364-4382 | AD-14946 | 923 | AAGUGGGAUGAAGACCUGUTT | 924 | ACAGGUCUUCAUCCCACUUTT |
| 4359-4377 | AD-14947 | 925 | GGAUGAAGACCUGUUUUGCTT | 926 | GCAAAACAGGUCUUCAUCCTT |
| 2744-2762 | AD-14948 | 927 | UCUGGACAUGGAUCAAGCATT | 928 | UGCUUGAUCCAUGUCCAGATT |
| 4787-4805 | AD-14949 | 929 | UUUGGUACAUGGAAUAGUUTT | 930 | AACUAUUCCAUGUACCAAATT |

TABLE 9
Silencing effect of JCVirus siRNAs

| | Residual | | | Relative | | |
|---|---|---|---|---|---|---|
| | luciferase | | | siRNA | | |
| | activity | | | activity | | |
| | (relative to | SD of | Residual | (normalized | SD of | Relative |
| | control | residual | luciferase | to positive | relative | siRNA |
| Duplex | siRNA treated | luciferase | activity +/− | control luc- | siRNA | activity +/− |
| Name | cells) | activity | SD | siRNA) | activity | SD |
| AD-14742 | 40.85 | 4.38 | 41 ± 4% | 82.24 | 8.83 | 82 ± 9% |
| AD-14743 | 20.92 | 4.1 | 21 ± 4% | 109.97 | 21.56 | 110 ± 22% |
| AD-14744 | 62.2 | 4.47 | 62 ± 4% | 52.56 | 3.78 | 53 ± 4% |
| AD-14745 | 43.97 | 2.6 | 44 ± 3% | 77.91 | 4.6 | 78 ± 5% |
| AD-14746 | 24.52 | 1.96 | 25 ± 2% | 104.96 | 8.38 | 105 ± 8% |
| AD-14747 | 32.67 | 4.51 | 33 ± 5% | 93.62 | 12.94 | 94 ± 13% |
| AD-14748 | 93.99 | 3.23 | 94 ± 3% | 8.36 | 0.29 | 8 ± 0% |
| AD-14749 | 55.16 | 2.81 | 55 ± 3% | 62.35 | 3.18 | 62 ± 3% |
| AD-14750 | 30.86 | 3.11 | 31 ± 3% | 96.14 | 9.7 | 96 ± 10% |
| AD-14751 | 54.44 | 4.03 | 54 ± 4% | 63.35 | 4.69 | 63 ± 5% |
| AD-14752 | 53.88 | 7.58 | 54 ± 8% | 64.13 | 9.02 | 64 ± 9% |
| AD-14753 | 35.24 | 7.45 | 35 ± 7% | 90.05 | 19.03 | 90 ± 19% |
| AD-14754 | 70.39 | 2.8 | 70 ± 3% | 41.17 | 1.64 | 41 ± 2% |
| AD-14755 | 41.8 | 1.6 | 42 ± 2% | 80.93 | 3.1 | 81 ± 3% |
| AD-14756 | 56.69 | 3.05 | 57 ± 3% | 60.22 | 3.24 | 60 ± 3% |
| AD-14757 | 39.16 | 2.16 | 39 ± 2% | 84.6 | 4.67 | 85 ± 5% |
| AD-14758 | 39.79 | 2.95 | 40 ± 3% | 83.72 | 6.22 | 84 ± 6% |
| AD-14759 | 30.62 | 1.01 | 31 ± 1% | 96.48 | 3.2 | 96 ± 3% |
| AD-14760 | 28.14 | 2.74 | 28 ± 3% | 99.93 | 9.72 | 100 ± 10% |
| AD-14761 | 67.42 | 2.83 | 67 ± 3% | 45.3 | 1.9 | 45 ± 2% |
| AD-14762 | 36.1 | 1.3 | 36 ± 1% | 88.85 | 3.21 | 89 ± 3% |
| AD-14763 | 49.39 | 6.77 | 49 ± 7% | 78.14 | 10.71 | 78 ± 11% |
| AD-14764 | 74.04 | 5.32 | 74 ± 5% | 40.09 | 2.88 | 40 ± 3% |
| AD-14765 | 50.84 | 10.47 | 51 ± 10% | 75.91 | 15.63 | 76 ± 16% |
| AD-14766 | 72.59 | 3.55 | 73 ± 4% | 42.32 | 2.07 | 42 ± 2% |
| AD-14767 | 34.82 | 7.41 | 35 ± 7% | 100.63 | 21.4 | 101 ± 21% |
| AD-14768 | 48.68 | 6.31 | 49 ± 6% | 79.24 | 10.27 | 79 ± 10% |
| AD-14769 | 39.07 | 5.53 | 39 ± 6% | 94.08 | 13.31 | 94 ± 13% |
| AD-14770 | 45.59 | 5.89 | 46 ± 6% | 84.01 | 10.85 | 84 ± 11% |
| AD-14771 | 45.57 | 4.1 | 46 ± 4% | 84.04 | 7.56 | 84 ± 8% |
| AD-14772 | 33.12 | 3.64 | 33 ± 4% | 103.26 | 11.36 | 103 ± 11% |
| AD-14773 | 37.38 | 5.72 | 37 ± 6% | 96.69 | 14.78 | 97 ± 15% |
| AD-14774 | 42.38 | 4.41 | 42 ± 4% | 88.96 | 9.26 | 89 ± 9% |
| AD-14775 | 46.59 | 3 | 47 ± 3% | 82.47 | 5.31 | 82 ± 5% |
| AD-14776 | 71.28 | 8.67 | 71 ± 9% | 44.35 | 5.4 | 44 ± 5% |
| AD-14777 | 64.55 | 6.21 | 65 ± 6% | 54.74 | 5.26 | 55 ± 5% |
| AD-14778 | 60.45 | 8.91 | 60 ± 9% | 61.07 | 9 | 61 ± 9% |
| AD-14779 | 32.46 | 0.82 | 32 ± 1% | 104.27 | 2.63 | 104 ± 3% |
| AD-14780 | 22.96 | 2.86 | 23 ± 3% | 118.94 | 14.81 | 119 ± 15% |
| AD-14781 | 56.99 | 9.43 | 57 ± 9% | 66.41 | 10.99 | 66 ± 11% |
| AD-14782 | 29.9 | 8.74 | 30 ± 9% | 108.24 | 31.65 | 108 ± 32% |
| AD-14783 | 42.63 | 6.57 | 43 ± 7% | 88.58 | 13.66 | 89 ± 14% |
| AD-14784 | 67.06 | 1.35 | 67 ± 1% | 50.86 | 1.03 | 51 ± 1% |
| AD-14785 | 48.9 | 3.32 | 49 ± 3% | 78.89 | 5.35 | 79 ± 5% |
| AD-14786 | 27.74 | 2.06 | 28 ± 2% | 111.57 | 8.29 | 112 ± 8% |
| AD-14787 | 38.77 | 6.24 | 39 ± 6% | 94.53 | 15.22 | 95 ± 15% |
| AD-14788 | 32.84 | 8.6 | 33 ± 9% | 103.7 | 27.17 | 104 ± 27% |
| AD-14789 | 46.96 | 1.7 | 47 ± 2% | 81.89 | 2.96 | 82 ± 3% |
| AD-14790 | 43.61 | 4.9 | 44 ± 5% | 87.06 | 9.79 | 87 ± 10% |
| AD-14791 | 35.55 | 4.34 | 36 ± 4% | 99.51 | 12.15 | 100 ± 12% |
| AD-14792 | 38.22 | 3.51 | 38 ± 4% | 95.38 | 8.75 | 95 ± 9% |
| AD-14793 | 90.85 | 5.92 | 91 ± 6% | 14.13 | 0.92 | 14 ± 1% |
| AD-14794 | 83.37 | 3.27 | 83 ± 3% | 25.68 | 1.01 | 26 ± 1% |
| AD-14795 | 55.06 | 3.61 | 55 ± 4% | 69.38 | 4.55 | 69 ± 5% |
| AD-14796 | 30.98 | 5.78 | 31 ± 6% | 106.56 | 19.89 | 107 ± 20% |
| AD-14797 | 28.95 | 3.15 | 29 ± 3% | 109.7 | 11.95 | 110 ± 12% |
| AD-14798 | 67.39 | 3.7 | 67 ± 4% | 50.35 | 2.76 | 50 ± 3% |
| AD-14799 | 66.83 | 4.72 | 67 ± 5% | 51.21 | 3.61 | 51 ± 4% |
| AD-14800 | 33.26 | 5.72 | 33 ± 6% | 103.04 | 17.71 | 103 ± 18% |
| AD-14801 | 39.15 | 4.57 | 39 ± 5% | 93.96 | 10.97 | 94 ± 11% |
| AD-14802 | 91.2 | 5.35 | 91 ± 5% | 13.58 | 0.8 | 14 ± 1% |
| AD-14803 | 34.15 | 7.94 | 34 ± 8% | 101.67 | 23.64 | 102 ± 24% |
| AD-14804 | 30.08 | 6.54 | 30 ± 7% | 107.96 | 23.48 | 108 ± 23% |
| AD-14805 | 32.44 | 4.27 | 32 ± 4% | 104.31 | 13.73 | 104 ± 14% |
| AD-14806 | 35.62 | 3.11 | 36 ± 3% | 99.41 | 8.67 | 99 ± 9% |
| AD-14807 | 28.27 | 7.28 | 28 ± 7% | 110.76 | 28.52 | 111 ± 29% |
| AD-14808 | 30.29 | 3.96 | 30 ± 4% | 107.63 | 14.08 | 108 ± 14% |
| AD-14809 | 31.59 | 4.46 | 32 ± 4% | 105.63 | 14.91 | 106 ± 15% |
| AD-14810 | 30.11 | 5.71 | 30 ± 6% | 107.91 | 20.46 | 108 ± 20% |
| AD-14811 | 55.27 | 6.82 | 55 ± 7% | 69.06 | 8.52 | 69 ± 9% |
| AD-14812 | 45.27 | 5.99 | 45 ± 6% | 84.51 | 11.19 | 85 ± 11% |
| AD-14813 | 77.97 | 7.01 | 78 ± 7% | 34.01 | 3.06 | 34 ± 3% |
| AD-14814 | 29.54 | 3.56 | 30 ± 4% | 108.78 | 13.09 | 109 ± 13% |
| AD-14815 | 65.04 | 3.18 | 65 ± 3% | 53.97 | 2.64 | 54 ± 3% |
| AD-14816 | 64.03 | 4.63 | 64 ± 5% | 55.53 | 4.02 | 56 ± 4% |
| AD-14817 | 37.83 | 2.89 | 38 ± 3% | 95.99 | 7.33 | 96 ± 7% |
| AD-14818 | 28.88 | 5.6 | 29 ± 6% | 109.82 | 21.3 | 110 ± 21% |
| AD-14819 | 92.9 | 4.87 | 93 ± 5% | 10.97 | 0.58 | 11 ± 1% |
| AD-14820 | 75.41 | 3.69 | 75 ± 4% | 37.97 | 1.86 | 38 ± 2% |
| AD-14821 | 73.08 | 6.22 | 73 ± 6% | 41.57 | 3.54 | 42 ± 4% |
| AD-14822 | 86.39 | 9.34 | 86 ± 9% | 21.02 | 2.27 | 21 ± 2% |
| AD-14823 | 96.5 | 10.46 | 97 ± 10% | 5.4 | 0.59 | 5 ± 1% |
| AD-14824 | 32.62 | 3.41 | 33 ± 3% | 104.03 | 10.89 | 104 ± 11% |
| AD-14825 | 102.71 | 7.66 | 103 ± 8% | −4.18 | 0.31 | −4 ± 0% |
| AD-14826 | 92.45 | 5.66 | 92 ± 6% | 11.66 | 0.71 | 12 ± 1% |
| AD-14827 | 63.46 | 16.38 | 63 ± 16% | 46 | 11.88 | 46 ± 12% |
| AD-14828 | 45.99 | 15.21 | 46 ± 15% | 67.99 | 22.49 | 68 ± 22% |
| AD-14829 | 40.54 | 16.03 | 41 ± 16% | 74.86 | 29.6 | 75 ± 30% |
| AD-14830 | 117.1 | 3.66 | 117 ± 4% | −21.52 | 0.67 | −22 ± 1% |
| AD-14831 | 54.78 | 21.12 | 55 ± 21% | 56.93 | 21.95 | 57 ± 22% |
| AD-14832 | 67.07 | 10.81 | 67 ± 11% | 41.46 | 6.68 | 41 ± 7% |
| AD-14833 | 71.52 | 11.9 | 72 ± 12% | 35.85 | 5.97 | 36 ± 6% |
| AD-14834 | 58.05 | 16.37 | 58 ± 16% | 52.81 | 14.89 | 53 ± 15% |
| AD-14835 | 93.36 | 5.43 | 93 ± 5% | 8.36 | 0.49 | 8 ± 0% |
| AD-14836 | 108.84 | 4.85 | 109 ± 5% | −11.13 | 0.5 | −11 ± 0% |
| AD-14837 | 106.68 | 10.06 | 107 ± 10% | −8.41 | 0.79 | −8 ± 1% |
| AD-14838 | 37.06 | 6.68 | 37 ± 7% | 79.23 | 14.28 | 79 ± 14% |
| AD-14839 | 36.03 | 7.54 | 36 ± 8% | 80.53 | 16.84 | 81 ± 17% |
| AD-14840 | 38.51 | 5.9 | 39 ± 6% | 77.4 | 11.86 | 77 ± 12% |
| AD-14841 | 110.86 | 8.91 | 111 ± 9% | −13.67 | 1.1 | −14 ± 1% |
| AD-14842 | 34.83 | 5.51 | 35 ± 6% | 82.04 | 12.98 | 82 ± 13% |
| AD-14843 | 23.75 | 6.04 | 24 ± 6% | 95.99 | 24.41 | 96 ± 24% |
| AD-14844 | 27.47 | 5.29 | 27 ± 5% | 91.3 | 17.57 | 91 ± 18% |
| AD-14845 | 93.12 | 4.7 | 93 ± 5% | 8.67 | 0.44 | 9 ± 0% |
| AD-14846 | 81.72 | 8.26 | 82 ± 8% | 23.01 | 2.33 | 23 ± 2% |
| AD-14847 | 77.89 | 5.29 | 78 ± 5% | 27.83 | 1.89 | 28 ± 2% |
| AD-14848 | 44.4 | 4.95 | 44 ± 5% | 69.99 | 7.81 | 70 ± 8% |
| AD-14849 | 46.41 | 5.08 | 46 ± 5% | 67.46 | 7.38 | 67 ± 7% |
| AD-14850 | 35.52 | 6.7 | 36 ± 7% | 81.17 | 15.31 | 81 ± 15% |
| AD-14851 | 36.07 | 1.13 | 36 ± 1% | 102.63 | 3.22 | 103 ± 3% |
| AD-14852 | 67.98 | 6.75 | 68 ± 7% | 51.41 | 5.11 | 51 ± 5% |
| AD-14853 | 69.44 | 3.07 | 69 ± 3% | 49.05 | 2.17 | 49 ± 2% |
| AD-14854 | 29.12 | 6.88 | 29 ± 7% | 113.79 | 26.89 | 114 ± 27% |
| AD-14855 | 36.04 | 7.07 | 36 ± 7% | 102.68 | 20.14 | 103 ± 20% |
| AD-14856 | 33.61 | 7.93 | 34 ± 8% | 106.57 | 25.15 | 107 ± 25% |
| AD-14857 | 50.76 | 8.76 | 51 ± 9% | 79.04 | 13.64 | 79 ± 14% |
| AD-14858 | 53.6 | 7.26 | 54 ± 7% | 74.49 | 10.09 | 74 ± 10% |
| AD-14859 | 39.07 | 9.34 | 39 ± 9% | 97.82 | 23.38 | 98 ± 23% |
| AD-14860 | 62.78 | 6.85 | 63 ± 7% | 59.75 | 6.52 | 60 ± 7% |
| AD-14861 | 87.47 | 1.86 | 87 ± 2% | 20.12 | 0.43 | 20 ± 0% |
| AD-14862 | 79.95 | 4.02 | 80 ± 4% | 32.19 | 1.62 | 32 ± 2% |
| AD-14863 | 30.46 | 4.49 | 30 ± 4% | 111.64 | 16.46 | 112 ± 16% |
| AD-14864 | 33.18 | 5.07 | 33 ± 5% | 107.26 | 16.38 | 107 ± 16% |
| AD-14865 | 26.25 | 3.98 | 26 ± 4% | 118.39 | 17.96 | 118 ± 18% |
| AD-14866 | 36.73 | 1.24 | 37 ± 1% | 101.57 | 3.44 | 102 ± 3% |
| AD-14867 | 33.16 | 3.13 | 33 ± 3% | 107.3 | 10.12 | 107 ± 10% |
| AD-14868 | 29.91 | 4.56 | 30 ± 5% | 112.52 | 17.16 | 113 ± 17% |
| AD-14869 | 28.24 | 3.66 | 28 ± 4% | 115.2 | 14.91 | 115 ± 15% |
| AD-14870 | 50.37 | 3.04 | 50 ± 3% | 79.67 | 4.81 | 80 ± 5% |
| AD-14871 | 39.37 | 5.11 | 39 ± 5% | 97.32 | 12.63 | 97 ± 13% |
| AD-14872 | 34.71 | 4.12 | 35 ± 4% | 104.82 | 12.43 | 105 ± 12% |
| AD-14873 | 32.14 | 1.79 | 32 ± 2% | 108.93 | 6.07 | 109 ± 6% |
| AD-14874 | 101.77 | 4.87 | 102 ± 5% | −2.85 | 0.14 | −3 ± 0% |
| AD-14875 | 80.81 | 4.39 | 81 ± 4% | 30.8 | 1.67 | 31 ± 2% |
| AD-14876 | 30.74 | 1.88 | 31 ± 2% | 111.18 | 6.81 | 111 ± 7% |
| AD-14877 | 57.38 | 2.84 | 57 ± 3% | 68.42 | 3.39 | 68 ± 3% |
| AD-14878 | 70.23 | 3.35 | 70 ± 3% | 47.79 | 2.28 | 48 ± 2% |
| AD-14879 | 79.03 | 7.72 | 79 ± 8% | 33.66 | 3.29 | 34 ± 3% |
| AD-14880 | 21.65 | 2.46 | 22 ± 2% | 125.78 | 14.28 | 126 ± 14% |
| AD-14881 | 27.66 | 1.71 | 28 ± 2% | 116.13 | 7.17 | 116 ± 7% |
| AD-14882 | 34.01 | 2.94 | 34 ± 3% | 105.93 | 9.16 | 106 ± 9% |
| AD-14883 | 40.62 | 3.22 | 41 ± 3% | 95.33 | 7.56 | 95 ± 8% |
| AD-14884 | 35.73 | 5.94 | 36 ± 6% | 103.18 | 17.14 | 103 ± 17% |
| AD-14885 | 47.4 | 7.65 | 47 ± 8% | 84.45 | 13.63 | 84 ± 14% |
| AD-14886 | 37.23 | 3.94 | 37 ± 4% | 100.76 | 10.67 | 101 ± 11% |
| AD-14887 | 42.94 | 7.26 | 43 ± 7% | 91.61 | 15.5 | 92 ± 15% |
| AD-14888 | 32.58 | 4.06 | 33 ± 4% | 108.24 | 13.5 | 108 ± 14% |
| AD-14889 | 83.09 | 2.98 | 83 ± 3% | 27.15 | 0.97 | 27 ± 1% |
| AD-14890 | 59.49 | 2.94 | 59 ± 3% | 65.04 | 3.22 | 65 ± 3% |
| AD-14891 | 21.93 | 5.52 | 22 ± 6% | 125.32 | 31.52 | 125 ± 32% |
| AD-14892 | 72.69 | 2.19 | 73 ± 2% | 43.84 | 1.32 | 44 ± 1% |
| AD-14893 | 24.43 | 7.07 | 24 ± 7% | 121.32 | 35.11 | 121 ± 35% |
| AD-14894 | 33.84 | 5.08 | 34 ± 5% | 106.2 | 15.95 | 106 ± 16% |
| AD-14895 | 21.68 | 4.46 | 22 ± 4% | 125.73 | 25.84 | 126 ± 26% |
| AD-14896 | 26.99 | 5.01 | 27 ± 5% | 117.2 | 21.73 | 117 ± 22% |
| AD-14897 | 29.04 | 2.72 | 29 ± 3% | 113.92 | 10.67 | 114 ± 11% |
| AD-14898 | 32.64 | 4.87 | 33 ± 5% | 108.14 | 16.13 | 108 ± 16 |
| AD-14899 | 61.71 | 4.59 | 62 ± 5% | 61.47 | 4.57 | 61 ± 5% |
| AD-14900 | 31.01 | 2.84 | 31 ± 3% | 110.75 | 10.14 | 111 ± 10% |
| AD-14901 | 31.47 | 1.57 | 31 ± 2% | 110.01 | 5.49 | 110 ± 5% |
| AD-14902 | 76.99 | 0.55 | 77 ± 1% | 36.95 | 0.26 | 37 ± 0% |
| AD-14903 | 20.55 | 3.55 | 21 ± 4% | 127.55 | 22.05 | 128 ± 22% |
| AD-14904 | 22.65 | 6.87 | 23 ± 7% | 124.18 | 37.68 | 124 ± 38% |
| AD-14905 | 56.98 | 4.94 | 57 ± 5% | 69.07 | 5.99 | 69 ± 6% |
| AD-14906 | 34.2 | 3.66 | 34 ± 4% | 105.63 | 11.29 | 106 ± 11% |
| AD-14907 | 28.59 | 8.12 | 29 ± 8% | 114.64 | 32.56 | 115 ± 33% |
| AD-14908 | 34.08 | 3.36 | 34 ± 3% | 105.82 | 10.44 | 106 ± 10% |
| AD-14909 | 76.57 | 2.33 | 77 ± 2% | 37.61 | 1.15 | 38 ± 1% |
| AD-14910 | 46.5 | 4.14 | 46 ± 4% | 85.89 | 7.64 | 86 ± 8% |
| AD-14911 | 29.62 | 2.02 | 30 ± 2% | 112.99 | 7.69 | 113 ± 8% |
| AD-14912 | 22.27 | 0.48 | 22 ± 0% | 124.78 | 2.69 | 125 ± 3% |
| AD-14913 | 59.8 | 2.85 | 60 ± 3% | 64.53 | 3.08 | 65 ± 3% |
| AD-14914 | 93.21 | 5.1 | 93 ± 5% | 10.9 | 0.6 | 11 ± 1% |
| AD-14915 | 25.99 | 4.45 | 26 ± 4% | 118.82 | 20.34 | 119 ± 20% |
| AD-14916 | 48.2 | 1.46 | 48 ± 1% | 83.16 | 2.51 | 83 ± 3% |
| AD-14917 | 41.03 | 3.07 | 41 ± 3% | 94.67 | 7.08 | 95 ± 7% |
| AD-14918 | 110.62 | 6.34 | 111 ± 6% | −17.04 | 0.98 | −17 ± 1% |
| AD-14919 | 73.66 | 3.68 | 74 ± 4% | 42.29 | 2.11 | 42 ± 2% |
| AD-14920 | 19.8 | 1.72 | 20 ± 2% | 128.75 | 11.2 | 129 ± 11% |
| AD-14921 | 33.13 | 1.14 | 33 ± 1% | 107.34 | 3.71 | 107 ± 4% |
| AD-14922 | 52.94 | 6.99 | 53 ± 7% | 63.41 | 8.37 | 63 ± 8% |
| AD-14923 | 33.77 | 8.92 | 34 ± 9% | 89.23 | 23.56 | 89 ± 24% |
| AD-14924 | 64.47 | 10.96 | 64 ± 11% | 47.86 | 8.13 | 48 ± 8% |
| AD-14925 | 97.16 | 7.57 | 97 ± 8% | 3.83 | 0.3 | 4 ± 0% |
| AD-14926 | 27.29 | 8.79 | 27 ± 9% | 97.96 | 31.56 | 98 ± 32% |
| AD-14927 | 27.02 | 10.01 | 27 ± 10% | 98.33 | 36.42 | 98 ± 36% |
| AD-14928 | 76.75 | 4.78 | 77 ± 5% | 31.32 | 1.95 | 31 ± 2% |
| AD-14929 | 32.92 | 9.44 | 33 ± 9% | 90.38 | 25.93 | 90 ± 26% |
| AD-14930 | 31 | 9.4 | 31 ± 9% | 92.97 | 28.21 | 93 ± 28% |
| AD-14931 | 31.36 | 8.73 | 31 ± 9% | 92.48 | 25.74 | 92 ± 26% |
| AD-14932 | 32.42 | 9.01 | 32 ± 9% | 91.05 | 25.29 | 91 ± 25% |
| AD-14933 | 39.94 | 6.96 | 40 ± 7% | 80.92 | 14.1 | 81 ± 14% |
| AD-14934 | 42.94 | 7.66 | 43 ± 8% | 76.88 | 13.71 | 77 ± 14% |
| AD-14935 | 47.74 | 8.48 | 48 ± 8% | 70.41 | 12.51 | 70 ± 13% |
| AD-14936 | 35.21 | 4.02 | 35 ± 4% | 87.29 | 9.97 | 87 ± 10% |
| AD-14937 | 89.25 | 3.53 | 89 ± 4% | 14.48 | 0.57 | 14 ± 1% |
| AD-14938 | 29.38 | 6.46 | 29 ± 6% | 95.15 | 20.91 | 95 ± 21% |
| AD-14939 | 26.45 | 8.33 | 26 ± 8% | 99.09 | 31.21 | 99 ± 31% |
| AD-14940 | 77.5 | 6.51 | 78 ± 7% | 30.31 | 2.55 | 30 ± 3% |
| AD-14941 | 36.4 | 10.76 | 36 ± 11% | 85.68 | 25.32 | 86 ± 25% |
| AD-14942 | 65.11 | 5.84 | 65 ± 6% | 47.01 | 4.22 | 47 ± 4% |
| AD-14943 | 89.96 | 4.69 | 90 ± 5% | 13.52 | 0.71 | 14 ± 1% |
| AD-14944 | 48.98 | 5.85 | 49 ± 6% | 68.74 | 8.21 | 69 ± 8% |
| AD-14945 | 43.45 | 3.29 | 43 ± 3% | 76.18 | 5.77 | 76 ± 6% |
| AD-14946 | 41.25 | 1.26 | 41 ± 1% | 79.15 | 2.43 | 79 ± 2% |
| AD-14947 | 42.1 | 7.34 | 42 ± 7% | 78.01 | 13.6 | 78 ± 14% |
| AD-14948 | 42.39 | 5.75 | 42 ± 6% | 77.62 | 10.54 | 78 ± 11% |
| AD-14949 | 27.68 | 5.79 | 28 ± 6% | 97.44 | 20.39 | 97 ± 20% |

TABLE 10
siRNAs targeting JCV transcripts for primary screen.

| | | | SEQ | | | |
|---|---|---|---|---|---|---|
| Duplex | | Position in | ID | Sequence | SEQ | Sequence |
| Name | Chemistry | Consensus | NO: | (5′--> 3′) | ID NO: | (5′--> 3′) |

| | | | | | | |
|---|---|---|---|---|---|---|
| AD-12598 | a | 1426-1444 | 1 | AcuuuuAGGGuuGuAcGGGTsT | 2 | CcCGuAcAACCCuAAAAGUTsT |
| AD-12708 | b | 1426-1444 | 3 | AcuuuuAGGGuuGuAcGGGTsT | 4 | CCCGuAcAACCCuAAAAGUTsT |
| AD-12599 | a | 1427-1445 | 5 | cuuuuAGGGuuGuAcGGGATsT | 6 | UcCCGuAcAACCCuAAAAGTsT |
| AD-12709 | b | 1427-1445 | 7 | cuuuuAGGGuuGuAcGGGATsT | 8 | UCCCGuAcAACCCuAAAAGTsT |
| AD-12600 | a | 2026-2044 | 9 | cAGAGcAcAAGGcGuAccuTsT | 10 | AgGuACGCCUUGUGCUCUGTsT |
| AD-12710 | b | 2026-2044 | 11 | cAGAGcAcAAGGcGuAccuTsT | 12 | AGGuACGCCUUGUGCUCUGTsT |
| AD-12784 | c | 2026-2044 | 13 | caGAGcAcAAGGcGuAccuTsT | 14 | AGGuACGCCUUGUGCUCUGTsT |
| AD-12832 | d | 2026-2044 | 15 | caGAGcAcAAGGcGuAccuTsT | 16 | AgGuACGCCUUGUGCUCUGTsT |
| AD-12601 | a | 1431-1449 | 17 | uAGGGuuGuAcGGGAcuGuTsT | 18 | AcAGUCCCGuAcAACCCuATsT |
| AD-12785 | c | 1431-1449 | 19 | uaGGGuuGuAcGGGAcuGuTsT | 20 | AcAGUCCCGuAcAACCCuATsT |
| AD-12602 | a | 1432-1450 | 21 | AGGGuuGuAcGGGAcuGuATsT | 22 | uacAGUCCCGuAcAACCCUTsT |
| AD-12711 | b | 1432-1450 | 23 | AGGGuuGuAcGGGAcuGuATsT | 24 | uAcAGUCCCGuAcAACCCUTsT |
| AD-12786 | c | 1432-1450 | 25 | AgGGuuGuAcGGGAcuGuATsT | 26 | uAcAGUCCCGuAcAACCCUTsT |
| AD-12833 | d | 1432-1450 | 27 | AgGGuuGuAcGGGAcuGuATsT | 28 | uacAGUCCCGuAcAACCCUTsT |
| AD-12603 | a | 1436-1454 | 29 | uuGuAcGGGAcuGuAAcAcTsT | 30 | GuGUuAcAGUCCCGuAcAATsT |
| AD-12712 | b | 1436-1454 | 31 | uuGuAcGGGAcuGuAAcAcTsT | 32 | GUGUuAcAGUCCCGuAcAATsT |
| AD-12604 | a | 4794-4812 | 33 | GccuGAuuuuGGuAcAuGGTsT | 34 | CcAUGuACcAAAAUcAGGCTsT |
| AD-12605 | a | 5099-5117 | 35 | GAAGuAGuAAGGGcGuGGATsT | 36 | UccACGCCCUuACuACUUCTsT |
| AD-12713 | b | 5099-5117 | 37 | GAAGuAGuAAGGGcGuGGATsT | 38 | UCcACGCCCUuACuACUUCTsT |
| AD-12787 | c | 5099-5117 | 39 | GaAGuAGuAAGGGcGuGGATsT | 40 | UCcACGCCCUuACuACUUCTsT |
| AD-12834 | d | 5099-5117 | 41 | GaAGuAGuAAGGGcGuGGATsT | 42 | UccACGCCCUuACuACUUCTsT |
| AD-12606 | a | 713-731 | 43 | AuAGGccuuAcuccuGAAATsT | 44 | UuUcAGGAGuAAGGCCuAUTsT |
| AD-12714 | b | 713-731 | 45 | AuAGGccuuAcuccuGAAATsT | 46 | UUUcAGGAGuAAGGCCuAUTsT |
| AD-12607 | a | 3946-3964 | 47 | GAcAGccAuAuGcAGuAGuTsT | 48 | AcuACUGcAuAUGGCUGUCTsT |
| AD-12715 | b | 3946-3964 | 49 | GAcAGccAuAuGcAGuAGuTsT | 50 | ACuACUGcAuAUGGCUGUCTsT |
| AD-12788 | c | 3946-3964 | 51 | GacAGccAuAuGcAGuAGuTsT | 52 | ACuACUGcAuAUGGCUGUCTsT |
| AD-12835 | d | 3946-3964 | 53 | GacAGccAuAuGcAGuAGuTsT | 54 | AcuACUGcAuAUGGCUGUCTsT |
| AD-12608 | a | 1128-1146 | 55 | AAAcuAcuuGGGcAAuAGuTsT | 56 | AcuAUUGCCcAAGuAGUUUTsT |
| AD-12716 | b | 1128-1146 | 57 | AAAcuAcuuGGGcAAuAGuTsT | 58 | ACuAUUGCCcAAGuAGUUUTsT |
| AD-12789 | c | 1128-1146 | 59 | AaAcuAcuuGGGcAAuAGuTsT | 60 | ACuAUUGCCcAAGuAGUUUTsT |
| AD-12836 | d | 1128-1146 | 61 | AaAcuAcuuGGGcAAuAGuTsT | 62 | AcuAUUGCCcAAGuAGUUUTsT |
| AD-12609 | a | 525-543 | 63 | ucAGGuucAuGGGuGccGcTsT | 64 | GcGGcACCcAUGAACCUGATsT |
| AD-12717 | b | 525-543 | 65 | ucAGGuucAuGGGuGccGcTsT | 66 | GCGGcACCcAUGAACCUGATsT |
| AD-12610 | a | 5096-5114 | 67 | GuAGuAAGGGcGuGGAGGcTsT | 68 | GcCUCcACGCCCUuACuACTsT |
| AD-12718 | b | 5096-5114 | 69 | GuAGuAAGGGcGuGGAGGcTsT | 70 | GCCUCcACGCCCUuACuACTsT |
| AD-12611 | a | 4727-4745 | 71 | uAuuGcAAGGAAuGGccuATsT | 72 | uaGGCcAUUCCUUGcAAuATsT |
| AD-12719 | b | 4727-4745 | 73 | uAuuGcAAGGAAuGGccuATsT | 74 | uAGGCcAUUCCUUGcAAuATsT |
| AD-12790 | c | 4727-4745 | 75 | uauuGcAAGGAAuGGccuATsT | 76 | uAGGCcAUUCCUUGcAAuATsT |
| AD-12837 | d | 4727-4745 | 77 | uauuGcAAGGAAuGGccuATsT | 78 | uaGGCcAUUCCUUGcAAuATsT |
| AD-12612 | a | 5097-5115 | 79 | AGuAGuAAGGGcGuGGAGGTsT | 80 | CcUCcACGCCCUuACuACUTsT |
| AD-12720 | b | 5097-5115 | 81 | AGuAGuAAGGGcGuGGAGGTsT | 82 | CCUCcACGCCCUuACuACUTsT |
| AD-12791 | c | 5097-5115 | 83 | AguAGuAAGGGcGuGGAGGTsT | 84 | CCUCcACGCCCUuACuACUTsT |
| AD-12838 | d | 5097-5115 | 85 | AguAGuAAGGGcGuGGAGGTsT | 86 | CcUCcACGCCCUuACuACUTsT |
| AD-12613 | a | 4601-4619 | 87 | uGcuAuuGcuuuGAuuGcuTsT | 88 | AgcAAUcAAAGcAAuAGcATsT |
| AD-12721 | b | 4601-4619 | 89 | uGcuAuuGcuuuGAuuGcuTsT | 90 | AGcAAUcAAAGcAAuAGcATsT |
| AD-12792 | c | 4601-4619 | 91 | ugcuAuuGcuuuGAuuGcuTsT | 92 | AGcAAUcAAAGcAAuAGcATsT |
| AD-12839 | d | 4601-4619 | 93 | ugcuAuuGcuuuGAuuGcuTsT | 94 | AgcAAUcAAAGcAAuAGcATsT |
| AD-12614 | a | 4600-4618 | 95 | GcuAuuGcuuuGAuuGcuuTsT | 96 | AaGcAAUcAAAGcAAuAGCTsT |
| AD-12722 | b | 4600-4618 | 97 | GcuAuuGcuuuGAuuGcuuTsT | 98 | AAGcAAUcAAAGcAAuAGCTsT |
| AD-12615 | a | 1421-1439 | 99 | ccuuuAcuuuuAGGGuuGuTsT | 100 | AcAACCCuAAAAGuAAAGGTsT |
| AD-12616 | a | 1424-1442 | 101 | uuAcuuuuAGGGuuGuAcGTsT | 102 | CguAcAACCCuAAAAGuAATsT |
| AD-12723 | b | 1424-1442 | 103 | uuAcuuuuAGGGuuGuAcGTsT | 104 | CGuAcAACCCuAAAAGuAATsT |
| AD-12617 | a | 1403-1421 | 105 | GcuccucAAuGGAuGuuGcTsT | 106 | GcAAcAUCcAUUGAGGAGCTsT |
| AD-12618 | a | 1534-1552 | 107 | uuAuAAGAGGAGGAGuAGATsT | 108 | UcuACUCCUCCUCUuAuAATsT |
| AD-12724 | b | 1534-1552 | 109 | uuAuAAGAGGAGGAGuAGATsT | 110 | UCuACUCCUCCUCUuAuAATsT |
| AD-12619 | a | 5098-5116 | 111 | AAGuAGuAAGGGcGuGGAGTsT | 112 | CuCcACGCCCUuACuACUUTsT |
| AD-12725 | b | 5098-5116 | 113 | AAGuAGuAAGGGcGuGGAGTsT | 114 | CUCcACGCCCUuACuACUUTsT |
| AD-12793 | c | 5098-5116 | 115 | AaGuAGuAAGGGcGuGGAGTsT | 116 | CUCcACGCCCUuACuACUUTsT |
| AD-12840 | d | 5098-5116 | 117 | AaGuAGuAAGGGcGuGGAGTsT | 118 | CuCcACGCCCUuACuACUUTsT |
| AD-12620 | a | 1430-1448 | 119 | uuAGGGuuGuAcGGGAcuGTsT | 120 | caGUCCCGuAcAACCCuAATsT |
| AD-12726 | b | 1430-1448 | 121 | uuAGGGuuGuAcGGGAcuGTsT | 122 | cAGUCCCGuAcAACCCuAATsT |
| AD-12621 | a | 1701-1719 | 123 | GAcAuGcuuccuuGuuAcATsT | 124 | UguAAcAAGGAAGcAUGUCTsT |
| AD-12727 | b | 1701-1719 | 125 | GAcAuGcuuccuuGuuAcATsT | 126 | UGuAAcAAGGAAGcAUGUCTsT |
| AD-12794 | c | 1701-1719 | 127 | GacAuGcuuccuuGuuAcATsT | 128 | UGuAAcAAGGAAGcAUGUCTsT |
| AD-12841 | d | 1701-1719 | 129 | GacAuGcuuccuuGuuAcATsT | 130 | UguAAcAAGGAAGcAUGUCTsT |
| AD-12622 | a | 2066-2084 | 131 | uGuuGAAuGuuGGGuuccuTsT | 132 | AgGAACCcAAcAUUcAAcATsT |
| AD-12728 | b | 2066-2084 | 133 | uGuuGAAuGuuGGGuuccuTsT | 134 | AGGAACCcAAcAUUcAAcATsT |
| AD-12795 | c | 2066-2084 | 135 | uguuGAAuGuuGGGuuccuTsT | 136 | AGGAACCcAAcAUUcAAcATsT |
| AD-12842 | d | 2066-2084 | 137 | uguuGAAuGuuGGGuuccuTsT | 138 | AgGAACCcAAcAUUcAAcATsT |
| AD-12623 | a | 4561-4579 | 139 | AcuuAAcccAAGAAGcucuTsT | 140 | AgAGCUUCUUGGGUuAAGUTsT |
| AD-12729 | b | 4561-4579 | 141 | AcuuAAcccAAGAAGcucuTsT | 142 | AGAGCUUCUUGGGUuAAGUTsT |
| AD-12624 | a | 4797-4815 | 143 | ucAGccuGAuuuuGGuAcATsT | 144 | UguACcAAAAUcAGGCUGATsT |
| AD-12730 | b | 4797-4815 | 145 | ucAGccuGAuuuuGGuAcATsT | 146 | UGuACcAAAAUcAGGCUGATsT |
| AD-12625 | a | 1428-1446 | 147 | uuuuAGGGuuGuAcGGGAcTsT | 148 | GuCCCGuAcAACCCuAAAATsT |
| AD-12731 | b | 1428-1446 | 149 | uuuuAGGGuuGuAcGGGAcTsT | 150 | GUCCCGuAcAACCCuAAAATsT |
| AD-12626 | a | 1429-1447 | 151 | uuuAGGGuuGuAcGGGAcuTsT | 152 | AgUCCCGuAcAACCCuAAATsT |
| AD-12732 | b | 1429-1447 | 153 | uuuAGGGuuGuAcGGGAcuTsT | 154 | AGUCCCGuAcAACCCuAAATsT |
| AD-12627 | a | 662-680 | 155 | ucccuuGcuAcuGuAGAGGTsT | 156 | CcUCuAcAGuAGcAAGGGATsT |
| AD-12733 | b | 662-680 | 157 | ucccuuGcuAcuGuAGAGGTsT | 158 | CCUCuAcAGuAGcAAGGGATsT |
| AD-12628 | a | 663-681 | 59 | cccuuGcuAcuGuAGAGGGTsT | 160 | CcCUCuAcAGuAGcAAGGGTsT |
| AD-12734 | b | 663-681 | 161 | cccuuGcuAcuGuAGAGGGTsT | 162 | CCCUCuAcAGuAGcAAGGGTsT |
| AD-12629 | a | 1402-1420 | 163 | uGcuccucAAuGGAuGuuGTsT | 164 | caAcAUCcAUUGAGGAGcATsT |
| AD-12735 | b | 1402-1420 | 165 | uGcuccucAAuGGAuGuuGTsT | 166 | cAAcAUCcAUUGAGGAGcATsT |
| AD-12796 | c | 1402-1420 | 167 | ugcuccucAAuGGAuGuuGTsT | 168 | cAAcAUCcAUUGAGGAGcATsT |
| AD-12843 | d | 1402-1420 | 169 | ugcuccucAAuGGAuGuuGTsT | 170 | caAcAUCcAUUGAGGAGcATsT |
| AD-12630 | a | 1398-1416 | 171 | GAucuGcuccucAAuGGAuTsT | 172 | AuCcAUUGAGGAGcAGAUCTsT |
| AD-12736 | b | 1398-1416 | 173 | GAucuGcuccucAAuGGAuTsT | 174 | AUCcAUUGAGGAGcAGAUCTsT |
| AD-12797 | c | 1398-1416 | 175 | GaucuGcuccucAAuGGAuTsT | 176 | AUCcAUUGAGGAGcAGAUCTsT |
| AD-12844 | d | 1398-1416 | 177 | GaucuGcuccucAAuGGAuTsT | 178 | AuCcAUUGAGGAGcAGAUCTsT |
| AD-12631 | a | 1399-1417 | 179 | AucuGcuccucAAuGGAuGTsT | 180 | caUCcAUUGAGGAGcAGAUTsT |
| AD-12737 | b | 1399-1417 | 181 | AucuGcuccucAAuGGAuGTsT | 182 | cAUCcAUUGAGGAGcAGAUTsT |
| AD-12632 | a | 1400-1418 | 183 | ucuGcuccucAAuGGAuGuTsT | 184 | AcAUCcAUUGAGGAGcAGATsT |
| AD-12633 | a | 1401-1419 | 185 | cuGcuccucAAuGGAuGuuTsT | 186 | AacAUCcAUUGAGGAGcAGTsT |
| AD-12738 | b | 1401-1419 | 187 | cuGcuccucAAuGGAuGuuTsT | 188 | AAcAUCcAUUGAGGAGcAGTsT |
| AD-12634 | a | 1435-1453 | 189 | GuuGuAcGGGAcuGuAAcATsT | 190 | UgUuAcAGUCCCGuAcAACTsT |
| AD-12739 | b | 1435-1453 | 191 | GuuGuAcGGGAcuGuAAcATsT | 192 | UGUuAcAGUCCCGuAcAACTsT |
| AD-12635 | a | 1437-1455 | 193 | uGuAcGGGAcuGuAAcAccTsT | 194 | GgUGUuAcAGUCCCGuAcATsT |
| AD-12740 | b | 1437-1455 | 195 | uGuAcGGGAcuGuAAcAccTsT | 196 | GGUGUuAcAGUCCCGuAcATsT |
| AD-12798 | c | 1437-1455 | 197 | uguAcGGGAcuGuAAcAccTsT | 198 | GGUGUuAcAGUCCCGuAcATsT |
| AD-12845 | d | 1437-1455 | 199 | uguAcGGGAcuGuAAcAccTsT | 200 | GgUGUuAcAGUCCCGuAcATsT |
| AD-12636 | a | 1438-1456 | 201 | GuAcGGGAcuGuAAcAccuTsT | 202 | AgGUGUuAcAGUCCCGuACTsT |
| AD-12741 | b | 1438-1456 | 203 | GuAcGGGAcuGuAAcAccuTsT | 204 | AGGUGUuAcAGUCCCGuACTsT |
| AD-12637 | a | 4796-4814 | 205 | cAGccuGAuuuuGGuAcAuTsT | 206 | AuGuACcAAAAUcAGGCUGTsT |
| AD-12742 | b | 4796-4814 | 207 | cAGccuGAuuuuGGuAcAuTsT | 208 | AUGuACcAAAAUcAGGCUGTsT |
| AD-12799 | c | 4796-4814 | 209 | caGccuGAuuuuGGuAcAuTsT | 210 | AUGuACcAAAAUcAGGCUGTsT |
| AD-12846 | d | 4796-4814 | 211 | caGccuGAuuuuGGuAcAuTsT | 212 | AuGuACcAAAAUcAGGCUGTsT |
| AD-12638 | a | 4992-5010 | 213 | GAAuAGGGAGGAAuccAuGTsT | 214 | caUGGAUUCCUCCCuAUUCTsT |
| AD-12743 | b | 4992-5010 | 215 | GAAuAGGGAGGAAuccAuGTsT | 216 | cAUGGAUUCCUCCCuAUUCTsT |
| AD-12800 | c | 4992-5010 | 217 | GaAuAGGGAGGAAuccAuGTsT | 218 | cAUGGAUUCCUCCCuAUUCTsT |
| AD-12847 | d | 4992-5010 | 219 | GaAuAGGGAGGAAuccAuGTsT | 220 | caUGGAUUCCUCCCuAUUCTsT |
| AD-12639 | a | 4999-5017 | 221 | AAGuGcuGAAuAGGGAGGATsT | 222 | UcCUCCCuAUUcAGcACUUTsT |
| AD-12744 | b | 4999-5017 | 223 | AAGuGcuGAAuAGGGAGGATsT | 224 | UCCUCCCuAUUcAGcACUUTsT |
| AD-12801 | c | 4999-5017 | 225 | AaGuGcuGAAuAGGGAGGATsT | 226 | UCCUCCCuAUUcAGcACUUTsT |
| AD-12848 | d | 4999-5017 | 227 | AaGuGcuGAAuAGGGAGGATsT | 228 | UcCUCCCuAUUcAGcACUUTsT |
| AD-12640 | a | 630-648 | 229 | AGGcuGcuGcuAcuAuAGATsT | 230 | UcuAuAGuAGcAGcAGCCUTsT |
| AD-12745 | b | 630-648 | 231 | AGGcuGcuGcuAcuAuAGATsT | 232 | UCuAuAGuAGcAGcAGCCUTsT |
| AD-12802 | c | 630-648 | 233 | AgGcuGcuGcuAcuAuAGATsT | 234 | UCuAuAGuAGcAGcAGCCUTsT |
| AD-12849 | d | 630-648 | 235 | AgGcuGcuGcuAcuAuAGATsT | 236 | UcuAuAGuAGcAGcAGCCUTsT |
| AD-12641 | a | 3947-3965 | 237 | AGAcAGccAuAuGcAGuAGTsT | 238 | CuACUGcAuAUGGCUGUCUTsT |
| AD-12803 | c | 3947-3965 | 239 | AgAcAGccAuAuGcAGuAGTsT | 240 | CuACUGcAuAUGGCUGUCUTsT |
| AD-12642 | a | 524-542 | 241 | uucAGGuucAuGGGuGccGTsT | 242 | CgGcACCcAUGAACCUGAATsT |
| AD-12746 | b | 524-542 | 243 | uucAGGuucAuGGGuGccGTsT | 244 | CGGcACCcAUGAACCUGAATsT |
| AD-12643 | a | 3948-3966 | 245 | uAGAcAGccAuAuGcAGuATsT | 246 | uaCUGcAuAUGGCUGUCuATsT |
| AD-12747 | b | 3948-3966 | 247 | uAGAcAGccAuAuGcAGuATsT | 248 | uACUGcAuAUGGCUGUCuATsT |
| AD-12804 | c | 3948-3966 | 249 | uaGAcAGccAuAuGcAGuATsT | 250 | uACUGcAuAUGGCUGUCuATsT |
| AD-12850 | d | 3948-3966 | 251 | uaGAcAGccAuAuGcAGuATsT | 252 | uaCUGcAuAUGGCUGUCuATsT |
| AD-12644 | a | 3900-3918 | 253 | GGAGcAuGAcuuuAAcccATsT | 254 | UgGGUuAAAGUcAUGCUCCTsT |
| AD-12748 | b | 3900-3918 | 255 | GGAGcAuGAcuuuAAcccATsT | 256 | UGGGUuAAAGUcAUGCUCCTsT |
| AD-12805 | c | 3900-3918 | 257 | GgAGcAuGAcuuuAAcccATsT | 258 | UGGGUuAAAGUcAUGCUCCTsT |
| AD-12851 | d | 3900-3918 | 259 | GgAGcAuGAcuuuAAcccATsT | 260 | UgGGUuAAAGUcAUGCUCCTsT |
| AD-12645 | a | 1417-1435 | 261 | GuuGccuuuAcuuuuAGGGTsT | 262 | CcCuAAAAGuAAAGGcAACTsT |
| AD-12749 | b | 1417-1435 | 263 | GuuGccuuuAcuuuuAGGGTsT | 264 | CCCuAAAAGuAAAGGcAACTsT |
| AD-12646 | a | 4565-4583 | 265 | uGuGAcuuAAcccAAGAAGTsT | 266 | CuUCUUGGGUuAAGUcAcATsT |
| AD-12750 | b | 4565-4583 | 267 | uGuGAcuuAAcccAAGAAGTsT | 268 | CUUCUUGGGUuAAGUcAcATsT |
| AD-12806 | c | 4565-4583 | 269 | uguGAcuuAAcccAAGAAGTsT | 270 | CUUCUUGGGUuAAGUcAcATsT |
| AD-12852 | d | 4565-4583 | 271 | uguGAcuuAAcccAAGAAGTsT | 272 | CuUCUUGGGUuAAGUcAcATsT |
| AD-12647 | a | 4598-4616 | 273 | uAuuGcuuuGAuuGcuucATsT | 274 | UgAAGcAAUcAAAGcAAuATsT |
| AD-12751 | b | 4598-4616 | 275 | uAuuGcuuuGAuuGcuucATsT | 276 | UGAAGcAAUcAAAGcAAuATsT |
| AD-12807 | c | 4598-4616 | 277 | uauuGcuuuGAuuGcuucATsT | 278 | UGAAGcAAUcAAAGcAAuATsT |
| AD-12853 | d | 4598-4616 | 279 | uauuGcuuuGAuuGcuucATsT | 280 | UgAAGcAAUcAAAGcAAuATsT |
| AD-12648 | a | 2060-2078 | 281 | AuAuccuGuuGAAuGuuGGTsT | 282 | CcAAcAUUcAAcAGGAuAUTsT |
| AD-12649 | a | 4729-4747 | 283 | uuuAuuGcAAGGAAuGGccTsT | 284 | GgCcAUUCCUUGcAAuAAATsT |
| AD-12752 | b | 4729-4747 | 285 | uuuAuuGcAAGGAAuGGccTsT | 286 | GGCcAUUCCUUGcAAuAAATsT |
| AD-12650 | a | 1122-1140 | 287 | uGGAAGAAAcuAcuuGGGcTsT | 288 | GcCcAAGuAGUUUCUUCcATsT |
| AD-12753 | b | 1122-1140 | 289 | uGGAAGAAAcuAcuuGGGcTsT | 290 | GCCcAAGuAGUUUCUUCcATsT |
| AD-12808 | c | 1122-1140 | 291 | ugGAAGAAAcuAcuuGGGcTsT | 292 | GCCcAAGuAGUUUCUUCcATsT |
| AD-12854 | d | 1122-1140 | 293 | ugGAAGAAAcuAcuuGGGcTsT | 294 | GcCcAAGuAGUUUCUUCcATsT |
| AD-12651 | a | 4261-4279 | 295 | AAGAcccuAAAGAcuuuccTsT | 296 | GgAAAGUCUUuAGGGUCUUTsT |
| AD-12754 | b | 4261-4279 | 297 | AAGAcccuAAAGAcuuuccTsT | 298 | GGAAAGUCUUuAGGGUCUUTsT |
| AD-12809 | c | 4261-4279 | 299 | AaGAcccuAAAGAcuuuccTsT | 300 | GGAAAGUCUUuAGGGUCUUTsT |
| AD-12855 | d | 4261-4279 | 301 | AaGAcccuAAAGAcuuuccTsT | 302 | GgAAAGUCUUuAGGGUCUUTsT |
| AD-12652 | a | 1412-1430 | 303 | uGGAuGuuGccuuuAcuuuTsT | 304 | AaAGuAAAGGcAAcAUCcATsT |
| AD-12755 | b | 1412-1430 | 305 | uGGAuGuuGccuuuAcuuuTsT | 306 | AAAGuAAAGGcAAcAUCcATsT |
| AD-12810 | c | 1412-1430 | 307 | ugGAuGuuGccuuuAcuuuTsT | 308 | AAAGuAAAGGcAAcAUCcATsT |
| AD-12856 | d | 1412-1430 | 309 | ugGAuGuuGccuuuAcuuuTsT | 310 | AaAGuAAAGGcAAcAUCcATsT |
| AD-12653 | a | 4592-4610 | 311 | uuuGAuuGcuucAGAcAAuTsT | 312 | AuUGUCUGAAGcAAUcAAATsT |
| AD-12756 | b | 4592-4610 | 313 | uuuGAuuGcuucAGAcAAuTsT | 314 | AUUGUCUGAAGcAAUcAAATsT |
| AD-12654 | a | 4991-5009 | 315 | AAuAGGGAGGAAuccAuGGTsT | 316 | CcAUGGAUUCCUCCCuAUUTsT |
| AD-12811 | c | 4991-5009 | 317 | AauAGGGAGGAAuccAuGGTsT | 318 | CcAUGGAUUCCUCCCuAUUTsT |
| AD-12655 | a | 5004-5022 | 319 | GGAcAAAGuGcuGAAuAGGTsT | 320 | CcuAUUcAGcACUUUGUCCTsT |
| AD-12757 | b | 5004-5022 | 321 | GGAcAAAGuGcuGAAuAGGTsT | 322 | CCuAUUcAGcACUUUGUCCTsT |
| AD-12812 | c | 5004-5022 | 323 | GgAcAAAGuGcuGAAuAGGTsT | 324 | CCuAUUcAGcACUUUGUCCTsT |
| AD-12857 | d | 5004-5022 | 325 | GgAcAAAGuGcuGAAuAGGTsT | 326 | CcuAUUcAGcACUUUGUCCTsT |
| AD-12656 | a | 5005-5023 | 327 | uGGAcAAAGuGcuGAAuAGTsT | 328 | CuAUUcAGcACUUUGUCcATsT |
| AD-12813 | c | 5005-5023 | 329 | ugGAcAAAGuGcuGAAuAGTsT | 330 | CuAUUcAGcACUUUGUCcATsT |
| AD-12657 | a | 654-672 | 331 | AAAuuGcAucccuuGcuAcTsT | 332 | GuAGcAAGGGAUGcAAUUUTsT |
| AD-12814 | c | 654-672 | 333 | AaAuuGcAucccuuGcuAcTsT | 334 | GuAGcAAGGGAUGcAAUUUTsT |
| AD-12658 | a | 659-677 | 335 | GcAucccuuGcuAcuGuAGTsT | 336 | CuAcAGuAGcAAGGGAUGCTsT |
| AD-12659 | a | 4273-4291 | 337 | AAAAAAAGGuAGAAGAcccTsT | 338 | GgGUCUUCuACCUUUUUUUTsT |
| AD-12758 | b | 4273-4291 | 339 | AAAAAAAGGuAGAAGAcccTsT | [symbol] | [symbol] |
| AD-12815 | c | 4273-4291 | 341 | AaAAAAAGGuAGAAGAcccTsT | 342 | GGGUCUUCuACCUUUUUUUTsT |
| AD-12858 | d | 4273-4291 | 343 | AaAAAAAGGuAGAAGAcccTsT | 344 | GgGUCUUCuACCUUUUUUUTsT |
| AD-12660 | a | 2025-2043 | 345 | AcAGAGcAcAAGGcGuAccTsT | 346 | GguACGCCUUGUGCUCUGUTsT |
| AD-12759 | b | 2025-2043 | 347 | AcAGAGcAcAAGGcGuAccTsT | 348 | GGuACGCCUUGUGCUCUGUTsT |
| AD-12661 | a | 4791-4809 | 349 | uGAuuuuGGuAcAuGGAAuTsT | 350 | AuUCcAUGuACcAAAAUcATsT |
| AD-12760 | b | 4791-4809 | 351 | uGAuuuuGGuAcAuGGAAuTsT | 352 | AUUCcAUGuACcAAAAUcATsT |
| AD-12816 | c | 4791-4809 | 353 | ugAuuuuGGuAcAuGGAAuTsT | 354 | AUUCcAUGuACcAAAAUcATsT |
| AD-12859 | d | 4791-4809 | 355 | ugAuuuuGGuAcAuGGAAuTsT | 356 | AuUCcAUGuACcAAAAUcATsT |
| AD-12662 | a | 1433-1451 | 357 | GGGuuGuAcGGGAcuGuAATsT | 358 | UuAcAGUCCCGuAcAACCCTsT |
| AD-12817 | c | 1433-1451 | 359 | GgGuuGuAcGGGAcuGuAATsT | 360 | UuAcAGUCCCGuAcAACCCTsT |
| AD-12663 | a | 1434-1452 | 361 | GGuuGuAcGGGAcuGuAAcTsT | 362 | GuuAcAGUCCCGuAcAACCTsT |
| AD-12761 | b | 1434-1452 | 363 | GGuuGuAcGGGAcuGuAAcTsT | 364 | GUuAcAGUCCCGuAcAACCTsT |
| AD-12818 | c | 1434-1452 | 365 | GguuGuAcGGGAcuGuAAcTsT | 366 | GUuAcAGUCCCGuAcAACCTsT |
| AD-12860 | d | 1434-1452 | 367 | GguuGuAcGGGAcuGuAAcTsT | 368 | GuuAcAGUCCCGuAcAACCTsT |
| AD-12664 | a | 1440-1458 | 369 | AcGGGAcuGuAAcAccuGcTsT | 370 | GcAGGUGUuAcAGUCCCGUTsT |
| AD-12665 | a | 1442-1460 | 371 | GGGAcuGuAAcAccuGcucTsT | 372 | GaGcAGGUGUuAcAGUCCCTsT |
| AD-12762 | b | 1442-1460 | 373 | GGGAcuGuAAcAccuGcucTsT | 374 | GAGcAGGUGUuAcAGUCCCTsT |
| AD-12819 | c | 1442-1460 | 375 | GgGAcuGuAAcAccuGcucTsT | 376 | GAGcAGGUGUuAcAGUCCCTsT |
| AD-12861 | d | 1442-1460 | 377 | GgGAcuGuAAcAccuGcucTsT | 378 | GaGcAGGUGUuAcAGUCCCTsT |
| AD-12666 | a | 1608-1626 | 379 | AcuccAGAAAuGGGuGAccTsT | 380 | GgUcACCcAUUUCUGGAGUTsT |
| AD-12763 | b | 1608-1626 | 381 | AcuccAGAAAuGGGuGAccTsT | 382 | GGUcACCcAUUUCUGGAGUTsT |
| AD-12667 | a | 4793-4811 | 383 | ccuGAuuuuGGuAcAuGGATsT | 384 | UccAUGuACcAAAAUcAGGTsT |
| AD-12764 | b | 4793-4811 | 385 | ccuGAuuuuGGuAcAuGGATsT | 386 | UCcAUGuACcAAAAUcAGGTsT |
| AD-12668 | a | 5001-5019 | 387 | cAAAGuGcuGAAuAGGGAGTsT | 388 | CuCCCuAUUcAGcACUUUGTsT |
| AD-12765 | b | 5001-5019 | 389 | cAAAGuGcuGAAuAGGGAGTsT | 390 | CUCCCuAUUcAGcACUUUGTsT |
| AD-12820 | c | 5001-5019 | 391 | caAAGuGcuGAAuAGGGAGTsT | 392 | CUCCCuAUUcAGcACUUUGTsT |
| AD-12862 | d | 5001-5019 | 393 | caAAGuGcuGAAuAGGGAGTsT | 394 | CuCCCuAUUcAGcACUUUGTsT |
| AD-12669 | a | 5066-5084 | 395 | ccAGGGAAAuucccuuGuuTsT | 396 | AacAAGGGAAUUUCCCUGGTsT |
| AD-12766 | b | 5066-5084 | 397 | ccAGGGAAAuucccuuGuuTsT | 398 | AAcAAGGGAAUUUCCCUGGTsT |
| AD-12670 | a | 5069-5087 | 399 | AGGccAGGGAAAuucccuuTsT | 400 | AaGGGAAUUUCCCUGGCCUTsT |
| AD-12767 | b | 5069-5087 | 401 | AGGccAGGGAAAuucccuuTsT | 402 | AAGGGAAUUUCCCUGGCCUTsT |
| AD-12821 | c | 5069-5087 | 403 | AgGccAGGGAAAuucccuuTsT | 404 | AAGGGAAUUUCCCUGGCCUTsT |
| AD-12863 | d | 5069-5087 | 405 | AgGccAGGGAAAuucccuuTsT | 406 | AaGGGAAUUUCCCUGGCCUTsT |
| AD-12671 | a | 564-582 | 407 | uAGuuGcuAcuGuuucuGATsT | 408 | UcAGAAAcAGuAGcAACuATsT |
| AD-12822 | c | 564-582 | 409 | uaGuuGcuAcuGuuucuGATsT | 410 | UcAGAAAcAGuAGcAACuATsT |
| AD-12672 | a | 633-651 | 411 | cuGcuGcuAcuAuAGAAGuTsT | 412 | AcUUCuAuAGuAGcAGcAGTsT |
| AD-12768 | b | 633-651 | 413 | cuGcuGcuAcuAuAGAAGuTsT | 414 | ACUUCuAuAGuAGcAGcAGTsT |
| AD-12673 | a | 634-652 | 415 | uGcuGcuAcuAuAGAAGuuTsT | 416 | AaCUUCuAuAGuAGcAGcATsT |
| AD-12769 | b | 634-652 | 417 | uGcuGcuAcuAuAGAAGuuTsT | 418 | AACUUCuAuAGuAGcAGcATsT |
| AD-12823 | c | 634-652 | 419 | ugcuGcuAcuAuAGAAGuuTsT | 420 | AACUUCuAuAGuAGcAGcATsT |
| AD-12864 | d | 634-652 | 421 | ugcuGcuAcuAuAGAAGuuTsT | 422 | AaCUUCuAuAGuAGcAGcATsT |
| AD-12674 | a | 635-653 | 423 | GcuGcuAcuAuAGAAGuuGTsT | 424 | caACUUCuAuAGuAGcAGCTsT |
| AD-12770 | b | 635-653 | 425 | GcuGcuAcuAuAGAAGuuGTsT | 426 | cAACUUCuAuAGuAGcAGCTsT |
| AD-12675 | a | 636-654 | 427 | cuGcuAcuAuAGAAGuuGATsT | 428 | UcAACUUCuAuAGuAGcAGTsT |
| AD-12676 | a | 637-655 | 429 | uGcuAcuAuAGAAGuuGAATsT | 430 | UucAACUUCuAuAGuAGcATsT |
| AD-12771 | b | 637-655 | 431 | uGcuAcuAuAGAAGuuGAATsT | 432 | UUcAACUUCuAuAGuAGcATsT |
| AD-12824 | c | 637-655 | 433 | ugcuAcuAuAGAAGuuGAATsT | 434 | UUcAACUUCuAuAGuAGcATsT |
| AD-12865 | d | 637-655 | 435 | ugcuAcuAuAGAAGuuGAATsT | 436 | UucAACUUCuAuAGuAGcATsT |
| AD-12677 | a | 912-930 | 437 | cAGAAGAcuAcuAuGAuAuTsT | 438 | AuAUcAuAGuAGUCUUCUGTsT |
| AD-12825 | c | 912-930 | 439 | caGAAGAcuAcuAuGAuAuTsT | 440 | AuAUcAuAGuAGUCUUCUGTsT |
| AD-12678 | a | 4153-4171 | 441 | AAAuuuuAuAuAAGAAAcuTsT | 442 | AgUUUCUuAuAuAAAAUUUTsT |
| AD-12772 | b | 4153-4171 | 443 | AAAuuuuAuAuAAGAAAcuTsT | 444 | AGUUUCUuAuAuAAAAUUUTsT |
| AD-12826 | c | 4153-4171 | 445 | AaAuuuuAuAuAAGAAAcuTsT | 446 | AGUUUCUuAuAuAAAAUUUTsT |
| AD-12866 | d | 4153-4171 | 447 | AaAuuuuAuAuAAGAAAcuTsT | 448 | AgUUUCUuAuAuAAAAUUUTsT |
| AD-12679 | a | 4779-4797 | 449 | AuGGAAuAGuucAGAGGuuTsT | 450 | AaCCUCUGAACuAUUCcAUTsT |
| AD-12773 | b | 4779-4797 | 451 | AuGGAAuAGuucAGAGGuuTsT | 452 | AACCUCUGAACuAUUCcAUTsT |
| AD-12680 | a | 4780-4798 | 453 | cAuGGAAuAGuucAGAGGuTsT | 454 | AcCUCUGAACuAUUCcAUGTsT |
| AD-12774 | b | 4780-4798 | 455 | cAuGGAAuAGuucAGAGGuTsT | 456 | ACCUCUGAACuAUUCcAUGTsT |
| AD-12827 | c | 4780-4798 | 457 | cauGGAAuAGuucAGAGGuTsT | 458 | ACCUCUGAACuAUUCcAUGTsT |
| AD-12867 | d | 4780-4798 | 459 | cauGGAAuAGuucAGAGGuTsT | 460 | AcCUCUGAACuAUUCcAUGTsT |
| AD-12681 | a | 4781-4799 | 461 | AcAuGGAAuAGuucAGAGGTsT | 462 | CcUCUGAACuAUUCcAUGUTsT |
| AD-12775 | b | 4781-4799 | 463 | AcAuGGAAuAGuucAGAGGTsT | 464 | CCUCUGAACuAUUCcAUGUTsT |
| AD-12682 | a | 4784-4802 | 465 | GGuAcAuGGAAuAGuucAGTsT | 466 | CuGAACuAUUCcAUGuACCTsT |
| AD-12776 | b | 4784-4802 | 467 | GGuAcAuGGAAuAGuucAGTsT | 468 | CUGAACuAUUCcAUGuACCTsT |
| AD-12828 | c | 4784-4802 | 469 | GguAcAuGGAAuAGuucAGTsT | 470 | CUGAACuAUUCcAUGuACCTsT |
| AD-12868 | d | 4784-4802 | 471 | GguAcAuGGAAuAGuucAGTsT | 472 | CuGAACuAUUCcAUGuACCTsT |
| AD-12683 | a | 4785-4803 | 473 | uGGuAcAuGGAAuAGuucATsT | 474 | UgAACuAUUCcAUGuACcATsT |
| AD-12777 | b | 4785-4803 | 475 | uGGuAcAuGGAAuAGuucATsT | 476 | UGAACuAUUCcAUGuACcATsT |
| AD-12829 | c | 4785-4803 | 477 | ugGuAcAuGGAAuAGuucATsT | 478 | UGAACuAUUCcAUGuACcATsT |
| AD-12869 | d | 4785-4803 | 479 | ugGuAcAuGGAAuAGuucATsT | 480 | UgAACuAUUCcAUGuACcATsT |
| AD-12684 | a | 719-737 | 481 | cuuAcuccuGAAAcAuAuGTsT | 482 | cauAUGUUUcAGGAGuAAGTsT |
| AD-12778 | b | 719-737 | 483 | cuuAcuccuGAAAcAuAuGTsT | 484 | cAuAUGUUUcAGGAGuAAGTsT |
| AD-12685 | a | 909-927 | 485 | AuccAGAAGAcuAcuAuGATsT | 486 | UcAuAGuAGUCUUCUGGAUTsT |
| AD-12686 | a | 1119-1137 | 487 | uuuuGGAAGAAAcuAcuuGTsT | 488 | caAGuAGUUUCUUCcAAAATsT |
| AD-12779 | b | 1119-1137 | 489 | uuuuGGAAGAAAcuAcuuGTsT | 490 | cAAGuAGUUUCUUCcAAAATsT |
| AD-12687 | a | 1121-1139 | 491 | uuGGAAGAAAcuAcuuGGGTsT | 492 | CccAAGuAGUUUCUUCcAATsT |
| AD-12780 | b | 1121-1139 | 493 | uuGGAAGAAAcuAcuuGGGTsT | 494 | CCcAAGuAGUUUCUUCcAATsT |
| AD-12688 | a | 4357-4375 | 495 | AuGAAGAccuGuuuuGccATsT | 496 | UgGcAAAAcAGGUCUUcAUTsT |
| AD-12781 | b | 4357-4375 | 497 | AuGAAGAccuGuuuuGccATsT | 498 | UGGcAAAAcAGGUCUUcAUTsT |
| AD-12689 | a | 4358-4376 | 499 | GAuGAAGAccuGuuuuGccTsT | 500 | GgcAAAAcAGGUCUUcAUCTsT |
| AD-12782 | b | 4358-4376 | 501 | GAuGAAGAccuGuuuuGccTsT | 502 | GGcAAAAcAGGUCUUcAUCTsT |
| AD-12830 | c | 4358-4376 | 503 | GauGAAGAccuGuuuuGccTsT | 504 | GGcAAAAcAGGUCUUcAUCTsT |
| AD-12870 | d | 4358-4376 | 505 | GauGAAGAccuGuuuuGccTsT | 506 | GgcAAAAcAGGUCUUcAUCTsT |
| AD-12690 | a | 4360-4378 | 507 | GGGAuGAAGAccuGuuuuGTsT | 508 | caAAAcAGGUCUUcAUCCCTsT |
| AD-12783 | b | 4360-4378 | 509 | GGGAuGAAGAccuGuuuuGTsT | 510 | cAAAAcAGGUCUUcAUCCCTsT |
| AD-12831 | c | 4360-4378 | 511 | GgGAuGAAGAccuGuuuuGTsT | 512 | cAAAAcAGGUCUUcAUCCCTsT |
| AD-12871 | d | 4360-4378 | 513 | GgGAuGAAGAccuGuuuuGTsT | 514 | caAAAcAGGUCUUcAUCCCTsT |

[symbol]

indicates data missing or illegible when filed

TABLE 11
Description of chemistries in Table 10

| Chemistry | Description |
|---|---|
| a | exo/endo-light + 2′-O-methyl in position 2 of |
| | antisense |
| b | exo/endo-light: sense strand: dTsdT + 2′OMe@all |
| | Py; antisense strand: dTsdT + |
| | 2′OMe@ Py in uA, cA |
| c | exo/endo-light + 2′-O-methyl in position 2 of sense |
| d | exo/endo-light + 2′-O-methyl in position 2 of sense |
| | and antisense |

TABLE 12
Silencing effect of modified JC Virus dsRNAs

| | | | | Relative | | |
|---|---|---|---|---|---|---|
| | Residual | | | siRNA | | |
| | luciferase | | | activity | | |
| | activity | SD of | Residual | (normalized | SD of | |
| | (relative to | residual | luciferase | to positive | relative | |
| | control siRNA | luciferace | activity +/− | control luc- | siRNA | Relative siRNA |
| Duplex Name | treated cells) | activity | SD | siRNA) | activity | activity +/− SD |
| AD-12598 | 91 | 11 | 91 ± 11% | 9 | 2 | 9 ± 2% |
| AD-12708 | 32 | 5 | 32 ± 5% | 76 | 17 | 76 ± 17% |
| AD-12599 | 25 | 6 | 25 ± 6% | 79 | 13 | 79 ± 13% |
| AD-12709 | 16 | 4 | 16 ± 4% | 97 | 26 | 97 ± 26% |
| AD-12600 | 79 | 9 | 79 ± 9% | 21 | 3 | 21 ± 3% |
| AD-12710 | 25 | 4 | 25 ± 4% | 85 | 24 | 85 ± 24% |
| AD-12784 | 23 | 2 | 23 ± 2% | 87 | 14 | 87 ± 14% |
| AD-12832 | 84 | 11 | 84 ± 11% | 18 | 4 | 18 ± 4% |
| AD-12601 | 102 | 8 | 102 ± 8% | −6 | 1 | −6 ± 1% |
| AD-12785 | 95 | 10 | 95 ± 10% | 6 | 1 | 6 ± 1% |
| AD-12602 | 107 | 9 | 107 ± 9% | −11 | 2 | −11 ± 2% |
| AD-12711 | 70 | 4 | 70 ± 4% | 34 | 3 | 34 ± 3% |
| AD-12786 | 69 | 8 | 69 ± 8% | 35 | 7 | 35 ± 7% |
| AD-12833 | 94 | 8 | 94 ± 8% | 7 | 1 | 7 ± 1% |
| AD-12603 | 100 | 9 | 100 ± 9% | −4 | 1 | −4 ± 1% |
| AD-12712 | 27 | 5 | 27 ± 5% | 82 | 16 | 82 ± 16% |
| AD-12604 | 15 | 2 | 15 ± 2% | 94 | 13 | 94 ± 13% |
| AD-12605 | 94 | 5 | 94 ± 5% | 7 | 0 | 7 ± 0% |
| AD-12713 | 61 | 10 | 61 ± 10% | 41 | 8 | 41 ± 8% |
| AD-12787 | 55 | 6 | 55 ± 6% | 47 | 6 | 47 ± 6% |
| AD-12834 | 92 | 16 | 92 ± 16% | 8 | 2 | 8 ± 2% |
| AD-12606 | 78 | 3 | 78 ± 3% | 25 | 1 | 25 ± 1% |
| AD-12714 | 63 | 6 | 63 ± 6% | 42 | 5 | 42 ± 5% |
| AD-12607 | 101 | 9 | 101 ± 9% | −1 | 0 | −1 ± 0% |
| AD-12715 | 101 | 5 | 101 ± 5% | −1 | 0 | −1 ± 0% |
| AD-12788 | 85 | 18 | 85 ± 18% | 15 | 4 | 15 ± 4% |
| AD-12835 | 95 | 9 | 95 ± 9% | 6 | 1 | 6 ± 1% |
| AD-12608 | 103 | 13 | 103 ± 13% | −3 | 0 | −3 ± 0% |
| AD-12716 | 81 | 9 | 81 ± 9% | 22 | 3 | 22 ± 3% |
| AD-12789 | 61 | 4 | 61 ± 4% | 44 | 4 | 44 ± 4% |
| AD-12836 | 103 | 11 | 103 ± 11% | −3 | 0 | −3 ± 0% |
| AD-12609 | 108 | 19 | 108 ± 19% | −9 | 2 | −9 ± 2% |
| AD-12717 | 94 | 17 | 94 ± 17% | 7 | 1 | 7 ± 1% |
| AD-12610 | 88 | 9 | 88 ± 9% | 14 | 2 | 14 ± 2% |
| AD-12718 | 39 | 4 | 39 ± 4% | 64 | 8 | 64 ± 8% |
| AD-12611 | 38 | 6 | 38 ± 6% | 69 | 12 | 69 ± 12% |
| AD-12719 | 26 | 4 | 26 ± 4% | 78 | 13 | 78 ± 13% |
| AD-12790 | 17 | 3 | 17 ± 3% | 87 | 18 | 87 ± 18% |
| AD-12837 | 22 | 4 | 22 ± 4% | 81 | 16 | 81 ± 16% |
| AD-12612 | 100 | 6 | 100 ± 6% | 0 | 0 | 0 ± 0% |
| AD-12720 | 73 | 6 | 73 ± 6% | 28 | 3 | 28 ± 3% |
| AD-12791 | 46 | 9 | 46 ± 9% | 57 | 12 | 57 ± 12% |
| AD-12838 | 97 | 15 | 97 ± 15% | 3 | 1 | 3 ± 1% |
| AD-12613 | 26 | 4 | 26 ± 4% | 82 | 15 | 82 ± 15% |
| AD-12721 | 10 | 1 | 10 ± 1% | 94 | 12 | 94 ± 12% |
| AD-12792 | 10 | 3 | 10 ± 3% | 94 | 40 | 94 ± 40% |
| AD-12839 | 22 | 3 | 22 ± 3% | 81 | 12 | 81 ± 12% |
| AD-12614 | 15 | 5 | 15 ± 5% | 94 | 38 | 94 ± 38% |
| AD-12722 | 6 | 1 | 6 ± 1% | 98 | 26 | 98 ± 26% |
| AD-12615 | 93 | 4 | 93 ± 4% | 8 | 0 | 8 ± 0% |
| AD-12616 | 95 | 4 | 95 ± 4% | 5 | 0 | 5 ± 0% |
| AD-12723 | 73 | 7 | 73 ± 7% | 30 | 3 | 30 ± 3% |
| AD-12617 | 88 | 10 | 88 ± 10% | 13 | 2 | 13 ± 2% |
| AD-12618 | 42 | 7 | 42 ± 7% | 60 | 7 | 60 ± 7% |
| AD-12724 | 21 | 5 | 21 ± 5% | 89 | 32 | 89 ± 32% |
| AD-12619 | 95 | 7 | 95 ± 7% | 6 | 1 | 6 ± 1% |
| AD-12725 | 71 | 2 | 71 ± 2% | 30 | 1 | 30 ± 1% |
| AD-12793 | 54 | 7 | 54 ± 7% | 48 | 7 | 48 ± 7% |
| AD-12840 | 94 | 9 | 94 ± 9% | 7 | 1 | 7 ± 1% |
| AD-12620 | 106 | 7 | 106 ± 7% | −8 | 1 | −8 ± 1% |
| AD-12726 | 100 | 7 | 100 ± 7% | 0 | 0 | 0 ± 0% |
| AD-12621 | 107 | 9 | 107 ± 9% | −7 | 1 | −7 ± 1% |
| AD-12727 | 47 | 4 | 47 ± 4% | 60 | 8 | 60 ± 8% |
| AD-12794 | 40 | 8 | 40 ± 8% | 67 | 20 | 67 ± 20% |
| AD-12841 | 78 | 13 | 78 ± 13% | 25 | 8 | 25 ± 8% |
| AD-12622 | 16 | 4 | 16 ± 4% | 92 | 29 | 92 ± 29% |
| AD-12728 | 25 | 6 | 25 ± 6% | 84 | 29 | 84 ± 29% |
| AD-12795 | 23 | 3 | 23 ± 3% | 86 | 20 | 86 ± 20% |
| AD-12842 | 19 | 4 | 19 ± 4% | 91 | 20 | 91 ± 20% |
| AD-12623 | 103 | 9 | 103 ± 9% | −3 | 0 | −3 ± 0% |
| AD-12729 | 84 | 8 | 84 ± 8% | 17 | 2 | 17 ± 2% |
| AD-12624 | 31 | 4 | 31 ± 4% | 77 | 12 | 77 ± 12% |
| AD-12730 | 18 | 1 | 18 ± 1% | 85 | 3 | 85 ± 3% |
| AD-12625 | 94 | 10 | 94 ± 10% | 5 | 1 | 5 ± 1% |
| AD-12731 | 57 | 4 | 57 ± 4% | 48 | 4 | 48 ± 4% |
| AD-12626 | 99 | 7 | 99 ± 7% | 0 | 0 | 0 ± 0% |
| AD-12732 | 82 | 5 | 82 ± 5% | 20 | 1 | 20 ± 1% |
| AD-12627 | 80 | 6 | 80 ± 6% | 22 | 2 | 22 ± 2% |
| AD-12733 | 65 | 6 | 65 ± 6% | 39 | 4 | 39 ± 4% |
| AD-12628 | 81 | 6 | 81 ± 6% | 21 | 2 | 21 ± 2% |
| AD-12734 | 82 | 7 | 82 ± 7% | 21 | 2 | 21 ± 2% |
| AD-12629 | 113 | 11 | 113 ± 11% | −14 | 2 | −14 ± 2% |
| AD-12735 | 90 | 9 | 90 ± 9% | 11 | 1 | 11 ± 1% |
| AD-12796 | 92 | 8 | 92 ± 8% | 9 | 1 | 9 ± 1% |
| AD-12843 | 117 | 7 | 117 ± 7% | −19 | 1 | −19 ± 1% |
| AD-12630 | 124 | 3 | 124 ± 3% | −27 | 1 | −27 ± 1% |
| AD-12736 | 85 | 4 | 85 ± 4% | 16 | 1 | 16 ± 1% |
| AD-12797 | 52 | 1 | 52 ± 1% | 53 | 1 | 53 ± 1% |
| AD-12844 | 96 | 4 | 96 ± 4% | 5 | 0 | 5 ± 0% |
| AD-12631 | 110 | 11 | 110 ± 11% | −12 | 1 | −12 ± 1% |
| AD-12737 | 115 | 13 | 115 ± 13% | −17 | 2 | −17 ± 2% |
| AD-12632 | 106 | 2 | 106 ± 2% | −7 | 0 | −7 ± 0% |
| AD-12633 | 107 | 12 | 107 ± 12% | −8 | 1 | −8 ± 1% |
| AD-12738 | 88 | 5 | 88 ± 5% | 14 | 1 | 14 ± 1% |
| AD-12634 | 79 | 5 | 79 ± 5% | 24 | 1 | 24 ± 1% |
| AD-12739 | 69 | 8 | 69 ± 8% | 35 | 6 | 35 ± 6% |
| AD-12635 | 75 | 8 | 75 ± 8% | 25 | 6 | 25 ± 6% |
| AD-12740 | 65 | 8 | 65 ± 8% | 40 | 8 | 40 ± 8% |
| AD-12798 | 56 | 4 | 56 ± 4% | 50 | 6 | 50 ± 6% |
| AD-12845 | 74 | 6 | 74 ± 6% | 30 | 3 | 30 ± 3% |
| AD-12636 | 89 | 8 | 89 ± 8% | 9 | 1 | 9 ± 1% |
| AD-12741 | 31 | 4 | 31 ± 4% | 78 | 14 | 78 ± 14% |
| AD-12637 | 16 | 2 | 16 ± 2% | 93 | 14 | 93 ± 14% |
| AD-12742 | 18 | 3 | 18 ± 3% | 85 | 14 | 85 ± 14% |
| AD-12799 | 18 | 4 | 18 ± 4% | 86 | 22 | 86 ± 22% |
| AD-12846 | 15 | 2 | 15 ± 2% | 89 | 14 | 89 ± 14% |
| AD-12638 | 95 | 6 | 95 ± 6% | 5 | 0 | 5 ± 0% |
| AD-12743 | 23 | 4 | 23 ± 4% | 81 | 15 | 81 ± 15% |
| AD-12800 | 14 | 1 | 14 ± 1% | 90 | 10 | 90 ± 10% |
| AD-12847 | 90 | 12 | 90 ± 12% | 10 | 2 | 10 ± 2% |
| AD-12639 | 113 | 11 | 113 ± 11% | −15 | 2 | −15 ± 2% |
| AD-12744 | 42 | 4 | 42 ± 4% | 60 | 7 | 60 ± 7% |
| AD-12801 | 34 | 3 | 34 ± 3% | 68 | 8 | 68 ± 8% |
| AD-12848 | 114 | 3 | 114 ± 3% | −14 | 0 | −14 ± 0% |
| AD-12640 | 96 | 11 | 96 ± 11% | 4 | 1 | 4 ± 1% |
| AD-12745 | 52 | 7 | 52 ± 7% | 53 | 8 | 53 ± 8% |
| AD-12802 | 74 | 9 | 74 ± 9% | 29 | 4 | 29 ± 4% |
| AD-12849 | 111 | 5 | 111 ± 5% | −12 | 1 | −12 ± 1% |
| AD-12641 | 103 | 8 | 103 ± 8% | −3 | 0 | −3 ± 0% |
| AD-12803 | 94 | 13 | 94 ± 13% | 6 | 1 | 6 ± 1% |
| AD-12642 | 105 | 3 | 105 ± 3% | −6 | 0 | −6 ± 0% |
| AD-12746 | 100 | 9 | 100 ± 9% | 0 | 0 | 0 ± 0% |
| AD-12643 | 33 | 4 | 33 ± 4% | 74 | 10 | 74 ± 10% |
| AD-12747 | 21 | 3 | 21 ± 3% | 83 | 13 | 83 ± 13% |
| AD-12804 | 25 | 4 | 25 ± 4% | 78 | 14 | 78 ± 14% |
| AD-12850 | 28 | 4 | 28 ± 4% | 75 | 11 | 75 ± 11% |
| AD-12644 | 82 | 7 | 82 ± 7% | 20 | 2 | 20 ± 2% |
| AD-12748 | 25 | 4 | 25 ± 4% | 78 | 14 | 78 ± 14% |
| AD-12805 | 23 | 7 | 23 ± 7% | 80 | 30 | 80 ± 30% |
| AD-12851 | 61 | 7 | 61 ± 7% | 41 | 5 | 41 ± 5% |
| AD-12645 | 112 | 6 | 112 ± 6% | −14 | 1 | −14 ± 1% |
| AD-12749 | 86 | 10 | 86 ± 10% | 16 | 2 | 16 ± 2% |
| AD-12646 | 94 | 10 | 94 ± 10% | 6 | 1 | 6 ± 1% |
| AD-12750 | 93 | 11 | 93 ± 11% | 7 | 1 | 7 ± 1% |
| AD-12806 | 77 | 8 | 77 ± 8% | 24 | 3 | 24 ± 3% |
| AD-12852 | 96 | 4 | 96 ± 4% | 5 | 0 | 5 ± 0% |
| AD-12647 | 27 | 3 | 27 ± 3% | 81 | 11 | 81 ± 11% |
| AD-12751 | 29 | 6 | 29 ± 6% | 74 | 19 | 74 ± 19% |
| AD-12807 | 31 | 2 | 31 ± 2% | 72 | 6 | 72 ± 6% |
| AD-12853 | 26 | 3 | 26 ± 3% | 78 | 11 | 78 ± 11% |
| AD-12648 | 81 | 9 | 81 ± 9% | 17 | 3 | 17 ± 3% |
| AD-12649 | 92 | 9 | 92 ± 9% | 8 | 1 | 8 ± 1% |
| AD-12752 | 71 | 9 | 71 ± 9% | 30 | 5 | 30 ± 5% |
| AD-12650 | 81 | 2 | 81 ± 2% | 21 | 1 | 21 ± 1% |
| AD-12753 | 57 | 1 | 57 ± 1% | 48 | 1 | 48 ± 1% |
| AD-12808 | 52 | 4 | 52 ± 4% | 54 | 5 | 54 ± 5% |
| AD-12854 | 77 | 5 | 77 ± 5% | 26 | 2 | 26 ± 2% |
| AD-12651 | 89 | 6 | 89 ± 6% | 13 | 1 | 13 ± 1% |
| AD-12754 | 88 | 7 | 88 ± 7% | 12 | 1 | 12 ± 1% |
| AD-12809 | 67 | 6 | 67 ± 6% | 35 | 4 | 35 ± 4% |
| AD-12855 | 88 | 10 | 88 ± 10% | 12 | 2 | 12 ± 2% |
| AD-12652 | 91 | 2 | 91 ± 2% | 10 | 0 | 10 ± 0% |
| AD-12755 | 40 | 3 | 40 ± 3% | 67 | 6 | 67 ± 6% |
| AD-12810 | 35 | 1 | 35 ± 1% | 72 | 3 | 72 ± 3% |
| AD-12856 | 75 | 8 | 75 ± 8% | 28 | 4 | 28 ± 4% |
| AD-12653 | 79 | 8 | 79 ± 8% | 23 | 3 | 23 ± 3% |
| AD-12756 | 17 | 5 | 17 ± 5% | 86 | 27 | 86 ± 27% |
| AD-12654 | 97 | 6 | 97 ± 6% | 3 | 0 | 3 ± 0% |
| AD-12811 | 74 | 5 | 74 ± 5% | 27 | 2 | 27 ± 2% |
| AD-12655 | 46 | 6 | 46 ± 6% | 59 | 9 | 59 ± 9% |
| AD-12757 | 14 | 0 | 14 ± 0% | 89 | 2 | 89 ± 2% |
| AD-12812 | 12 | 3 | 12 ± 3% | 92 | 28 | 92 ± 28% |
| AD-12857 | 35 | 7 | 35 ± 7% | 70 | 17 | 70 ± 17% |
| AD-12656 | 10 | 3 | 10 ± 3% | 99 | 33 | 99 ± 33% |
| AD-12813 | 9 | 1 | 9 ± 1% | 95 | 18 | 95 ± 18% |
| AD-12657 | 108 | 1 | 108 ± 1% | −9 | 0 | −9 ± 0% |
| AD-12814 | 101 | 4 | 101 ± 4% | −1 | 0 | −1 ± 0% |
| AD-12658 | 98 | 9 | 98 ± 9% | 2 | 0 | 2 ± 0% |
| AD-12659 | 83 | 4 | 83 ± 4% | 18 | 1 | 18 ± 1% |
| AD-12758 | 80 | 14 | 80 ± 14% | 21 | 4 | 21 ± 4% |
| AD-12815 | 25 | 3 | 25 ± 3% | 79 | 11 | 79 ± 11% |
| AD-12858 | 67 | 4 | 67 ± 4% | 35 | 2 | 35 ± 2% |
| AD-12660 | 95 | 11 | 95 ± 11% | 8 | 3 | 8 ± 3% |
| AD-12759 | 66 | 7 | 66 ± 7% | 39 | 6 | 39 ± 6% |
| AD-12661 | 34 | 2 | 34 ± 2% | 73 | 5 | 73 ± 5% |
| AD-12760 | 10 | 3 | 10 ± 3% | 94 | 30 | 94 ± 30% |
| AD-12816 | 12 | 4 | 12 ± 4% | 92 | 37 | 92 ± 37% |
| AD-12859 | 33 | 1 | 33 ± 1% | 72 | 2 | 72 ± 2% |
| AD-12662 | 92 | 7 | 92 ± 7% | 7 | 1 | 7 ± 1% |
| AD-12817 | 91 | 11 | 91 ± 11% | 10 | 2 | 10 ± 2% |
| AD-12663 | 99 | 10 | 99 ± 10% | 3 | [symbol] | [symbol] |
| AD-12761 | 20 | 5 | 20 ± 5% | 89 | 22 | 89 ± 22% |
| AD-12818 | 20 | 4 | 20 ± 4% | 90 | 20 | 90 ± 20% |
| AD-12860 | 93 | 11 | 93 ± 11% | 8 | 1 | 8 ± 1% |
| AD-12664 | 93 | 9 | 93 ± 9% | 6 | 2 | 6 ± 2% |
| AD-12665 | 94 | 8 | 94 ± 8% | 10 | 1 | 10 ± 1% |
| AD-12762 | 58 | 8 | 58 ± 8% | 47 | 10 | 47 ± 10% |
| AD-12819 | 49 | 6 | 49 ± 6% | 58 | 9 | 58 ± 9% |
| AD-12861 | 93 | 8 | 93 ± 8% | 8 | 1 | 8 ± 1% |
| AD-12666 | 30 | 5 | 30 ± 5% | 76 | 18 | 76 ± 18% |
| AD-12763 | 25 | 2 | 25 ± 2% | 84 | 9 | 84 ± 9% |
| AD-12667 | 65 | 10 | 65 ± 10% | 38 | 7 | 38 ± 7% |
| AD-12764 | 34 | 7 | 34 ± 7% | 69 | 17 | 69 ± 17% |
| AD-12668 | 34 | 4 | 34 ± 4% | 73 | 10 | 73 ± 10% |
| AD-12765 | 13 | 3 | 13 ± 3% | 91 | 22 | 91 ± 22% |
| AD-12820 | 11 | 2 | 11 ± 2% | 93 | 17 | 93 ± 17% |
| AD-12862 | 19 | 4 | 19 ± 4% | 87 | 22 | 87 ± 22% |
| AD-12669 | 22 | 3 | 22 ± 3% | 87 | 12 | 87 ± 12% |
| AD-12766 | 11 | 4 | 11 ± 4% | 93 | 39 | 93 ± 39% |
| AD-12670 | 45 | 3 | 45 ± 3% | 61 | 5 | 61 ± 5% |
| AD-12767 | 10 | 3 | 10 ± 3% | 94 | 31 | 94 ± 31% |
| AD-12821 | 12 | 1 | 12 ± 1% | 92 | 13 | 92 ± 13% |
| AD-12863 | 41 | 4 | 41 ± 4% | 64 | 8 | 64 ± 8% |
| AD-12671 | 83 | 9 | 83 ± 9% | 19 | 2 | 19 ± 2% |
| AD-12822 | 74 | 7 | 74 ± 7% | 29 | 3 | 29 ± 3% |
| AD-12672 | 52 | 7 | 52 ± 7% | 54 | 9 | 54 ± 9% |
| AD-12768 | 28 | 3 | 28 ± 3% | 81 | 12 | 81 ± 12% |
| AD-12673 | 56 | 5 | 56 ± 5% | 49 | 5 | 49 ± 5% |
| AD-12769 | 36 | 2 | 36 ± 2% | 72 | 5 | 72 ± 5% |
| AD-12823 | 33 | 2 | 33 ± 2% | 75 | 5 | 75 ± 5% |
| AD-12864 | 49 | 7 | 49 ± 7% | 57 | 10 | 57 ± 10% |
| AD-12674 | 90 | 9 | 90 ± 9% | 11 | 1 | 11 ± 1% |
| AD-12770 | 45 | 6 | 45 ± 6% | 61 | 9 | 61 ± 9% |
| AD-12675 | 45 | 5 | 45 ± 5% | 62 | 8 | 62 ± 8% |
| AD-12676 | 47 | 6 | 47 ± 6% | 59 | 9 | 59 ± 9% |
| AD-12771 | 31 | 4 | 31 ± 4% | 77 | 11 | 77 ± 11% |
| AD-12824 | 31 | 3 | 31 ± 3% | 77 | 10 | 77 ± 10% |
| AD-12865 | 43 | 7 | 43 ± 7% | 64 | 12 | 64 ± 12% |
| AD-12677 | 23 | 4 | 23 ± 4% | 86 | 16 | 86 ± 16% |
| AD-12825 | 22 | 4 | 22 ± 4% | 87 | 16 | 87 ± 16% |
| AD-12678 | 102 | 8 | 102 ± 8% | −2 | 0 | −2 ± 0% |
| AD-12772 | 101 | 13 | 101 ± 13% | −1 | 0 | −1 ± 0% |
| AD-12826 | 99 | 1 | 99 ± 1% | 1 | 0 | 1 ± 0% |
| AD-12866 | 91 | 7 | 91 ± 7% | 10 | 1 | 10 ± 1% |
| AD-12679 | 81 | 8 | 81 ± 8% | 21 | 2 | 21 ± 2% |
| AD-12773 | 11 | 2 | 11 ± 2% | 93 | 19 | 93 ± 19% |
| AD-12680 | 17 | 3 | 17 ± 3% | 92 | 17 | 92 ± 17% |
| AD-12774 | 15 | 2 | 15 ± 2% | 89 | [symbol] | [symbol] |
| AD-12827 | 11 | 2 | 11 ± 2% | 93 | 18 | 93 ± 18% |
| AD-12867 | 15 | 3 | 15 ± 3% | 91 | 22 | 91 ± 22% |
| AD-12681 | 28 | 3 | 28 ± 3% | 79 | 10 | 79 ± 10% |
| AD-12775 | 8 | 1 | 8 ± 1% | 95 | 19 | 95 ± 19% |
| AD-12682 | 43 | 6 | 43 ± 6% | 63 | 9 | 63 ± 9% |
| AD-12776 | 23 | 5 | 23 ± 5% | 80 | 19 | 80 ± 19% |
| AD-12828 | 23 | 5 | 23 ± 5% | 80 | 20 | 80 ± 20% |
| AD-12868 | 25 | 4 | 25 ± 4% | 81 | 16 | 81 ± 16% |
| AD-12683 | 17 | 2 | 17 ± 2% | 91 | 15 | 91 ± 15% |
| AD-12777 | 11 | 2 | 11 ± 2% | 92 | 22 | 92 ± 22% |
| AD-12829 | 12 | 1 | 12 ± 1% | 92 | 11 | 92 ± 11% |
| AD-12869 | 19 | 3 | 19 ± 3% | 87 | 16 | 87 ± 16% |
| AD-12684 | 87 | 12 | 87 ± 12% | 14 | 2 | 14 ± 2% |
| AD-12778 | 41 | 4 | 41 ± 4% | 66 | 8 | 66 ± 8% |
| AD-12685 | 35 | 1 | 35 ± 1% | 72 | 1 | 72 ± 1% |
| AD-12686 | 68 | 5 | 68 ± 5% | 36 | 3 | 36 ± 3% |
| AD-12779 | 58 | 5 | 58 ± 5% | 47 | 5 | 47 ± 5% |
| AD-12687 | 73 | 8 | 73 ± 8% | 30 | 4 | 30 ± 4% |
| AD-12780 | 62 | 8 | 62 ± 8% | 42 | 7 | 42 ± 7% |
| AD-12688 | 18 | 1 | 18 ± 1% | 91 | 4 | 91 ± 4% |
| AD-12781 | 11 | 3 | 11 ± 3% | 93 | 33 | 93 ± 33% |
| AD-12689 | 96 | 4 | 96 ± 4% | 4 | 0 | 4 ± 0% |
| AD-12782 | 45 | 7 | 45 ± 7% | 58 | 10 | 58 ± 10% |
| AD-12830 | 15 | 3 | 15 ± 3% | 89 | 19 | 89 ± 19% |
| AD-12870 | 51 | 3 | 51 ± 3% | 52 | 4 | 52 ± 4% |
| AD-12690 | 93 | 6 | 93 ± 6% | 8 | 1 | 8 ± 1% |
| AD-12783 | 36 | 3 | 36 ± 3% | 66 | 7 | 66 ± 7% |
| AD-12831 | 27 | 2 | 27 ± 2% | 76 | 7 | 76 ± 7% |
| AD-12871 | 81 | 18 | 81 ± 18% | 21 | 5 | 21 ± 5% |

[symbol]

indicates data missing or illegible when filed

TABLE 13
Exemplary JC Virus unmodified dsRNAs

| Position | SEQ | | | |
|---|---|---|---|---|
| in | ID | Sequence | SEQ ID | Sequence |
| Consensus | NO: | (5′--> 3′) | NO: | (5′--> 3′) |

| | | | | |
|---|---|---|---|---|
| 1533-1551 | 935 | CUUAUAAGAGGAGGAGUAG | 936 | CUACUCCUCCUCUUAUAAG |
| 1703-1721 | 937 | CAUGCUUCCUUGUUACAGU | 938 | ACUGUAACAAGGAAGCAUG |
| 1439-1457 | 939 | UACGGGACUGUAACACCUG | 940 | CAGGUGUUACAGUCCCGUA |
| 1705-1723 | 941 | UGCUUCCUUGUUACAGUGU | 942 | ACACUGUAACAAGGAAGCA |
| 2064-2082 | 943 | CCUGUUGAAUGUUGGGUUC | 944 | GAACCCAACAUUCAACAGG |
| 2067-2085 | 945 | GUUGAAUGUUGGGUUCCUG | 946 | CAGGAACCCAACAUUCAAC |
| 2071-2089 | 947 | AAUGUUGGGUUCCUGAUCC | 948 | GGAUCAGGAACCCAACAUU |
| 2121-2139 | 949 | ACACUAACAGGAGGAGAAA | 950 | UUUCUCCUCCUGUUAGUGU |
| 1535-1553 | 951 | UAUAAGAGGAGGAGUAGAA | 952 | UUCUACUCCUCCUCUUAUA |
| 1536-1554 | 953 | AUAAGAGGAGGAGUAGAAG | 954 | CUUCUACUCCUCCUCUUAU |
| 1445-1463 | 955 | ACUGUAACACCUGCUCUUG | 956 | CAAGAGCAGGUGUUACAGU |
| 1700-1718 | 957 | GGACAUGCUUCCUUGUUAC | 958 | GUAACAAGGAAGCAUGUCC |
| 1702-1720 | 959 | ACAUGCUUCCUUGUUACAG | 960 | CUGUAACAAGGAAGCAUGU |
| 1704-1722 | 961 | AUGCUUCCUUGUUACAGUG | 962 | CACUGUAACAAGGAAGCAU |
| 2065-2083 | 963 | CUGUUGAAUGUUGGGUUCC | 964 | GGAACCCAACAUUCAACAG |
| 2070-2088 | 965 | GAAUGUUGGGUUCCUGAUC | 966 | GAUCAGGAACCCAACAUUC |
| 1441-1459 | 967 | CGGGACUGUAACACCUGCU | 968 | AGCAGGUGUUACAGUCCCG |
| 1443-1461 | 969 | GGACUGUAACACCUGCUCU | 970 | AGAGCAGGUGUUACAGUCC |
| 1444-1462 | 971 | GACUGUAACACCUGCUCUU | 972 | AAGAGCAGGUGUUACAGUC |
| 1609-1627 | 973 | CUCCAGAAAUGGGUGACCC | 974 | GGGUCACCCAUUUCUGGAG |
| 1537-1555 | 975 | UAAGAGGAGGAGUAGAAGU | 976 | ACUUCUACUCCUCCUCUUA |
| 629-647 | 977 | GAGGCUGCUGCUACUAUAG | 978 | CUAUAGUAGCAGCAGCCUC |
| 656-674 | 979 | AUUGCAUCCCUUGCUACUG | 980 | CAGUAGCAAGGGAUGCAAU |
| 658-676 | 981 | UGCAUCCCUUGCUACUGUA | 982 | UACAGUAGCAAGGGAUGCA |
| 517-535 | 983 | UUGUGUUUUCAGGUUCAUG | 984 | CAUGAACCUGAAAACACAA |
| 559-577 | 985 | GGACCUAGUUGCUACUGUU | 986 | AACAGUAGCAACUAGGUCC |
| 591-609 | 987 | CUGCCACAGGAUUUUCAGU | 988 | ACUGAAAAUCCUGUGGCAG |
| 638-656 | 989 | GCUACUAUAGAAGUUGAAA | 990 | UUUCAACUUCUAUAGUAGC |
| 655-673 | 991 | AAUUGCAUCCCUUGCUACU | 992 | AGUAGCAAGGGAUGCAAUU |
| 561-579 | 993 | ACCUAGUUGCUACUGUUUC | 994 | GAAACAGUAGCAACUAGGU |
| 639-657 | 995 | CUACUAUAGAAGUUGAAAU | 996 | AUUUCAACUUCUAUAGUAG |
| 715-733 | 997 | AGGCCUUACUCCUGAAACA | 998 | UGUUUCAGGAGUAAGGCCU |
| 716-734 | 999 | GGCCUUACUCCUGAAACAU | 1000 | AUGUUUCAGGAGUAAGGCC |
| 326-344 | 1001 | GUAAAACCUGGAGUGGAAC | 1002 | GUUCCACUCCAGGUUUUAC |
| 518-536 | 1003 | UGUGUUUUCAGGUUCAUGG | 1004 | CCAUGAACCUGAAAACACA |
| 520-538 | 1005 | UGUUUUCAGGUUCAUGGGU | 1006 | ACCCAUGAACCUGAAAACA |
| 661-679 | 1007 | AUCCCUUGCUACUGUAGAG | 1008 | CUCUACAGUAGCAAGGGAU |
| 560-578 | 1009 | GACCUAGUUGCUACUGUUU | 1010 | AAACAGUAGCAACUAGGUC |
| 681-699 | 1011 | GGAUUACAAGUACCUCUGA | 1012 | UCAGAGGUACUUGUAAUCC |
| 714-732 | 1013 | UAGGCCUUACUCCUGAAAC | 1014 | GUUUCAGGAGUAAGGCCUA |
| 377-395 | 1015 | UGUUAGAAUUUUUGCUGGA | 1016 | UCCAGCAAAAAUUCUAACA |
| 589-607 | 1017 | UGCUGCCACAGGAUUUUCA | 1018 | UGAAAAUCCUGUGGCAGCA |
| 594-612 | 1019 | CCACAGGAUUUUCAGUAGC | 1020 | GCUACUGAAAAUCCUGUGG |
| 648-666 | 1021 | AAGUUGAAAUUGCAUCCCU | 1022 | AGGGAUGCAAUUUCAACUU |
| 649-667 | 1023 | AGUUGAAAUUGCAUCCCUU | 1024 | AAGGGAUGCAAUUUCAACU |
| 587-605 | 1025 | GCUGCUGCCACAGGAUUUU | 1026 | AAAAUCCUGUGGCAGCAGC |
| 325-343 | 1027 | AGUAAAACCUGGAGUGGAA | 1028 | UUCCACUCCAGGUUUUACU |
| 515-533 | 1029 | UUUUGUGUUUUCAGGUUCA | 1030 | UGAACCUGAAAACACAAAA |
| 516-534 | 1031 | UUUGUGUUUUCAGGUUCAU | 1032 | AUGAACCUGAAAACACAAA |
| 519-537 | 1033 | GUGUUUUCAGGUUCAUGGG | 1034 | CCCAUGAACCUGAAAACAC |
| 521-539 | 1035 | GUUUUCAGGUUCAUGGGUG | 1036 | CACCCAUGAACCUGAAAAC |
| 522-540 | 1037 | UUUUCAGGUUCAUGGGUGC | 1038 | GCACCCAUGAACCUGAAAA |
| 523-541 | 1039 | UUUCAGGUUCAUGGGUGCC | 1040 | GGCACCCAUGAACCUGAAA |
| 616-634 | 1041 | AAUUGCUGCUGGAGAGGCU | 1042 | AGCCUCUCCAGCAGCAAUU |
| 657-675 | 1043 | UUGCAUCCCUUGCUACUGU | 1044 | ACAGUAGCAAGGGAUGCAA |
| 761-779 | 1045 | GCUGUAGCUGGGUUUGCUG | 1046 | CAGCAAACCCAGCUACAGC |
| 645-663 | 1047 | UAGAAGUUGAAAUUGCAUC | 1048 | GAUGCAAUUUCAACUUCUA |
| 647-665 | 1049 | GAAGUUGAAAUUGCAUCCC | 1050 | GGGAUGCAAUUUCAACUUC |
| 660-678 | 1051 | CAUCCCUUGCUACUGUAGA | 1052 | UCUACAGUAGCAAGGGAUG |
| 324-342 | 1053 | UAGUAAAACCUGGAGUGGA | 1054 | UCCACUCCAGGUUUUACUA |
| 372-390 | 1055 | UUUUUUGUUAGAAUUUUUG | 1056 | CAAAAAUUCUAACAAAAAA |
| 640-658 | 1057 | UACUAUAGAAGUUGAAAUU | 1058 | AAUUUCAACUUCUAUAGUA |
| 562-580 | 1059 | CCUAGUUGCUACUGUUUCU | 1060 | AGAAACAGUAGCAACUAGG |
| 563-581 | 1061 | CUAGUUGCUACUGUUUCUG | 1062 | CAGAAACAGUAGCAACUAG |
| 566-584 | 1063 | GUUGCUACUGUUUCUGAGG | 1064 | CCUCAGAAACAGUAGCAAC |
| 625-643 | 1065 | UGGAGAGGCUGCUGCUACU | 1066 | AGUAGCAGCAGCCUCUCCA |
| 627-645 | 1067 | GAGAGGCUGCUGCUACUAU | 1068 | AUAGUAGCAGCAGCCUCUC |
| 628-646 | 1069 | AGAGGCUGCUGCUACUAUA | 1070 | UAUAGUAGCAGCAGCCUCU |
| 632-650 | 1071 | GCUGCUGCUACUAUAGAAG | 1072 | CUUCUAUAGUAGCAGCAGC |
| 513-531 | 1073 | UUUUUUGUGUUUUCAGGUU | 1074 | AACCUGAAAACACAAAAAA |
| 641-659 | 1075 | ACUAUAGAAGUUGAAAUUG | 1076 | CAAUUUCAACUUCUAUAGU |
| 323-341 | 1077 | UUAGUAAAACCUGGAGUGG | 1078 | CCACUCCAGGUUUUACUAA |
| 717-735 | 1079 | GCCUUACUCCUGAAACAUA | 1080 | UAUGUUUCAGGAGUAAGGC |
| 646-664 | 1081 | AGAAGUUGAAAUUGCAUCC | 1082 | GGAUGCAAUUUCAACUUCU |
| 592-610 | 1083 | UGCCACAGGAUUUUCAGUA | 1084 | UACUGAAAAUCCUGUGGCA |
| 590-608 | 1085 | GCUGCCACAGGAUUUUCAG | 1086 | CUGAAAAUCCUGUGGCAGC |
| 526-544 | 1087 | CAGGUUCAUGGGUGCCGCA | 1088 | UGCGGCACCCAUGAACCUG |
| 615-633 | 1089 | AAAUUGCUGCUGGAGAGGC | 1090 | GCCUCUCCAGCAGCAAUUU |
| 617-635 | 1091 | AUUGCUGCUGGAGAGGCUG | 1092 | CAGCCUCUCCAGCAGCAAU |
| 652-670 | 1093 | UGAAAUUGCAUCCCUUGCU | 1094 | AGCAAGGGAUGCAAUUUCA |
| 374-392 | 1095 | UUUUGUUAGAAUUUUUGCU | 1096 | AGCAAAAAUUCUAACAAAA |
| 375-393 | 1097 | UUUGUUAGAAUUUUUGCUG | 1098 | CAGCAAAAAUUCUAACAAA |
| 631-649 | 1099 | GGCUGCUGCUACUAUAGAA | 1100 | UUCUAUAGUAGCAGCAGCC |
| 376-394 | 1101 | UUGUUAGAAUUUUUGCUGG | 1102 | CCAGCAAAAAUUCUAACAA |
| 512-530 | 1103 | UUUUUUUGUGUUUUCAGGU | 1104 | ACCUGAAAACACAAAAAAA |
| 1127-1145 | 1105 | GAAACUACUUGGGCAAUAG | 1106 | CUAUUGCCCAAGUAGUUUC |
| 1410-1428 | 1107 | AAUGGAUGUUGCCUUUACU | 1108 | AGUAAAGGCAACAUCCAUU |
| 1406-1424 | 1109 | CCUCAAUGGAUGUUGCCUU | 1110 | AAGGCAACAUCCAUUGAGG |
| 1418-1436 | 1111 | UUGCCUUUACUUUUAGGGU | 1112 | ACCCUAAAAGUAAAGGCAA |
| 1126-1144 | 1113 | AGAAACUACUUGGGCAAUA | 1114 | UAUUGCCCAAGUAGUUUCU |
| 1125-1143 | 1115 | AAGAAACUACUUGGGCAAU | 1116 | AUUGCCCAAGUAGUUUCUU |
| 1419-1437 | 1117 | UGCCUUUACUUUUAGGGUU | 1118 | AACCCUAAAAGUAAAGGCA |
| 1420-1438 | 1119 | GCCUUUACUUUUAGGGUUG | 1120 | CAACCCUAAAAGUAAAGGC |
| 1422-1440 | 1121 | CUUUACUUUUAGGGUUGUA | 1122 | UACAACCCUAAAAGUAAAG |
| 1423-1441 | 1123 | UUUACUUUUAGGGUUGUAC | 1124 | GUACAACCCUAAAAGUAAA |
| 1425-1443 | 1125 | UACUUUUAGGGUUGUACGG | 1126 | CCGUACAACCCUAAAAGUA |
| 1123-1141 | 1127 | GGAAGAAACUACUUGGGCA | 1128 | UGCCCAAGUAGUUUCUUCC |
| 1409-1427 | 1129 | CAAUGGAUGUUGCCUUUAC | 1130 | GUAAAGGCAACAUCCAUUG |
| 1413-1431 | 1131 | GGAUGUUGCCUUUACUUUU | 1132 | AAAAGUAAAGGCAACAUCC |
| 1416-1434 | 1133 | UGUUGCCUUUACUUUUAGG | 1134 | CCUAAAAGUAAAGGCAACA |
| 1414-1432 | 1135 | GAUGUUGCCUUUACUUUUA | 1136 | UAAAAGUAAAGGCAACAUC |
| 911-929 | 1137 | CCAGAAGACUACUAUGAUA | 1138 | UAUCAUAGUAGUCUUCUGG |
| 910-928 | 1139 | UCCAGAAGACUACUAUGAU | 1140 | AUCAUAGUAGUCUUCUGGA |
| 1120-1138 | 1141 | UUUGGAAGAAACUACUUGG | 1142 | CCAAGUAGUUUCUUCCAAA |
| 1404-1422 | 1143 | CUCCUCAAUGGAUGUUGCC | 1144 | GGCAACAUCCAUUGAGGAG |
| 1337-1355 | 1145 | CCAAAUGUGCAAUCUGGUG | 1146 | CACCAGAUUGCACAUUUGG |
| 1338-1356 | 1147 | CAAAUGUGCAAUCUGGUGA | 1148 | UCACCAGAUUGCACAUUUG |
| 1397-1415 | 1149 | AGAUCUGCUCCUCAAUGGA | 1150 | UCCAUUGAGGAGCAGAUCU |
| 1407-1425 | 1151 | CUCAAUGGAUGUUGCCUUU | 1152 | AAAGGCAACAUCCAUUGAG |
| 4157-4175 | 1153 | GCUCAAAUUUUAUAUAAGA | 1154 | UCUUAUAUAAAAUUUGAGC |
| 4795-4813 | 1155 | AGCCUGAUUUUGGUACAUG | 1156 | CAUGUACCAAAAUCAGGCU |
| 4156-4174 | 1157 | CUCAAAUUUUAUAUAAGAA | 1158 | UUCUUAUAUAAAAUUUGAG |
| 5002-5020 | 1159 | ACAAAGUGCUGAAUAGGGA | 1160 | UCCCUAUUCAGCACUUUGU |
| 4792-4810 | 1161 | CUGAUUUUGGUACAUGGAA | 1162 | UUCCAUGUACCAAAAUCAG |
| 4790-4808 | 1163 | GAUUUUGGUACAUGGAAUA | 1164 | UAUUCCAUGUACCAAAAUC |
| 4801-4819 | 1165 | CUCAUCAGCCUGAUUUUGG | 1166 | CCAAAAUCAGGCUGAUGAG |
| 4622-4640 | 1167 | AGCCCACUUGUGUGGAUAG | 1168 | CUAUCCACACAAGUGGGCU |
| 4997-5015 | 1169 | GUGCUGAAUAGGGAGGAAU | 1170 | AUUCCUCCCUAUUCAGCAC |
| 5094-5112 | 1171 | AGUAAGGGCGUGGAGGCUU | 1172 | AAGCCUCCACGCCCUUACU |
| 4564-4582 | 1173 | GUGACUUAACCCAAGAAGC | 1174 | GCUUCUUGGGUUAAGUCAC |
| 5095-5113 | 1175 | UAGUAAGGGCGUGGAGGCU | 1176 | AGCCUCCACGCCCUUACUA |
| 4800-4818 | 1177 | UCAUCAGCCUGAUUUUGGU | 1178 | ACCAAAAUCAGGCUGAUGA |
| 4265-4283 | 1179 | GUAGAAGACCCUAAAGACU | 1180 | AGUCUUUAGGGUCUUCUAC |
| 4267-4285 | 1181 | AGGUAGAAGACCCUAAAGA | 1182 | UCUUUAGGGUCUUCUACCU |
| 4270-4288 | 1183 | AAAAGGUAGAAGACCCUAA | 1184 | UUAGGGUCUUCUACCUUUU |
| 4269-4287 | 1185 | AAAGGUAGAAGACCCUAAA | 1186 | UUUAGGGUCUUCUACCUUU |
| 2874-2892 | 1187 | GAUUGUGCAGUGGAAAGAA | 1188 | UUCUUUCCACUGCACAAUC |
| 2875-2893 | 1189 | GGAUUGUGCAGUGGAAAGA | 1190 | UCUUUCCACUGCACAAUCC |
| 3950-3968 | 1191 | UGUAGACAGCCAUAUGCAG | 1192 | CUGCAUAUGGCUGUCUACA |
| 3896-3914 | 1193 | CAUGACUUUAACCCAGAAG | 1194 | CUUCUGGGUUAAAGUCAUG |
| 4990-5008 | 1195 | AUAGGGAGGAAUCCAUGGA | 1196 | UCCAUGGAUUCCUCCCUAU |
| 4994-5012 | 1197 | CUGAAUAGGGAGGAAUCCA | 1198 | UGGAUUCCUCCCUAUUCAG |
| 5000-5018 | 1199 | AAAGUGCUGAAUAGGGAGG | 1200 | CCUCCCUAUUCAGCACUUU |
| 4563-4581 | 1201 | UGACUUAACCCAAGAAGCU | 1202 | AGCUUCUUGGGUUAAGUCA |
| 3895-3913 | 1203 | AUGACUUUAACCCAGAAGA | 1204 | UCUUCUGGGUUAAAGUCAU |
| 4262-4280 | 1205 | GAAGACCCUAAAGACUUUC | 1206 | GAAAGUCUUUAGGGUCUUC |
| 4162-4180 | 1207 | AAAAAGCUCAAAUUUUAUA | 1208 | UAUAAAAUUUGAGCUUUUU |
| 4798-4816 | 1209 | AUCAGCCUGAUUUUGGUAC | 1210 | GUACCAAAAUCAGGCUGAU |
| 4799-4817 | 1211 | CAUCAGCCUGAUUUUGGUA | 1212 | UACCAAAAUCAGGCUGAUG |
| 5006-5024 | 1213 | AUGGACAAAGUGCUGAAUA | 1214 | UAUUCAGCACUUUGUCCAU |
| 4264-4282 | 1215 | UAGAAGACCCUAAAGACUU | 1216 | AAGUCUUUAGGGUCUUCUA |
| 4268-4286 | 1217 | AAGGUAGAAGACCCUAAAG | 1218 | CUUUAGGGUCUUCUACCUU |
| 4623-4641 | 1219 | CAGCCCACUUGUGUGGAUA | 1220 | UAUCCACACAAGUGGGCUG |
| 4788-4806 | 1221 | UUUUGGUACAUGGAAUAGU | 1222 | ACUAUUCCAUGUACCAAAA |
| 4993-5011 | 1223 | UGAAUAGGGAGGAAUCCAU | 1224 | AUGGAUUCCUCCCUAUUCA |
| 4995-5013 | 1225 | GCUGAAUAGGGAGGAAUCC | 1226 | GGAUUCCUCCCUAUUCAGC |
| 4996-5014 | 1227 | UGCUGAAUAGGGAGGAAUC | 1228 | GAUUCCUCCCUAUUCAGCA |
| 3952-3970 | 1229 | UGUGUAGACAGCCAUAUGC | 1230 | GCAUAUGGCUGUCUACACA |
| 4595-4613 | 1231 | UGCUUUGAUUGCUUCAGAC | 1232 | GUCUGAAGCAAUCAAAGCA |
| 4596-4614 | 1233 | UUGCUUUGAUUGCUUCAGA | 1234 | UCUGAAGCAAUCAAAGCAA |
| 4597-4615 | 1235 | AUUGCUUUGAUUGCUUCAG | 1236 | CUGAAGCAAUCAAAGCAAU |
| 4599-4617 | 1237 | CUAUUGCUUUGAUUGCUUC | 1238 | GAAGCAAUCAAAGCAAUAG |
| 4726-4744 | 1239 | AUUGCAAGGAAUGGCCUAA | 1240 | UUAGGCCAUUCCUUGCAAU |
| 4753-4771 | 1241 | AUUUUCCUCCUAAUUCUGA | 1242 | UCAGAAUUAGGAGGAAAAU |
| 4802-4820 | 1243 | GCUCAUCAGCCUGAUUUUG | 1244 | CAAAAUCAGGCUGAUGAGC |
| 4803-4821 | 1245 | UGCUCAUCAGCCUGAUUUU | 1246 | AAAAUCAGGCUGAUGAGCA |
| 4806-4824 | 1247 | AGUUGCUCAUCAGCCUGAU | 1248 | AUCAGGCUGAUGAGCAACU |
| 5091-5109 | 1249 | AAGGGCGUGGAGGCUUUUU | 1250 | AAAAAGCCUCCACGCCCUU |
| 5093-5111 | 1251 | GUAAGGGCGUGGAGGCUUU | 1252 | AAAGCCUCCACGCCCUUAC |
| 4259-4277 | 1253 | GACCCUAAAGACUUUCCUG | 1254 | CAGGAAAGUCUUUAGGGUC |
| 3901-3919 | 1255 | AGGAGCAUGACUUUAACCC | 1256 | GGGUUAAAGUCAUGCUCCU |
| 4757-4775 | 1257 | UGUGAUUUUCCUCCUAAUU | 1258 | AAUUAGGAGGAAAAUCACA |
| 4758-4776 | 1259 | UUGUGAUUUUCCUCCUAAU | 1260 | AUUAGGAGGAAAAUCACAA |
| 4562-4580 | 1261 | GACUUAACCCAAGAAGCUC | 1262 | GAGCUUCUUGGGUUAAGUC |
| 4585-4603 | 1263 | GCUUCAGACAAUGGUUUGG | 1264 | CCAAACCAUUGUCUGAAGC |
| 4587-4605 | 1265 | UUGCUUCAGACAAUGGUUU | 1266 | AAACCAUUGUCUGAAGCAA |
| 4588-4606 | 1267 | AUUGCUUCAGACAAUGGUU | 1268 | AACCAUUGUCUGAAGCAAU |
| 4591-4609 | 1269 | UUGAUUGCUUCAGACAAUG | 1270 | CAUUGUCUGAAGCAAUCAA |
| 5003-5021 | 1271 | GACAAAGUGCUGAAUAGGG | 1272 | CCCUAUUCAGCACUUUGUC |
| 4165-4183 | 1273 | AAGAAAAAGCUCAAAUUUU | 1274 | AAAAUUUGAGCUUUUUCUU |
| 4166-4184 | 1275 | AAAGAAAAAGCUCAAAUUU | 1276 | AAAUUUGAGCUUUUUCUUU |
| 4263-4281 | 1277 | AGAAGACCCUAAAGACUUU | 1278 | AAAGUCUUUAGGGUCUUCU |
| 4274-4292 | 1279 | AAAAAAAAGGUAGAAGACC | 1280 | GGUCUUCUACCUUUUUUUU |
| 4266-4284 | 1281 | GGUAGAAGACCCUAAAGAC | 1282 | GUCUUUAGGGUCUUCUACC |
| 4272-4290 | 1283 | AAAAAAGGUAGAAGACCCU | 1284 | AGGGUCUUCUACCUUUUUU |
| 4271-4289 | 1285 | AAAAAGGUAGAAGACCCUA | 1286 | UAGGGUCUUCUACCUUUUU |
| 4559-4577 | 1287 | UUAACCCAAGAAGCUCUUC | 1288 | GAAGAGCUUCUUGGGUUAA |
| 4789-4807 | 1289 | AUUUUGGUACAUGGAAUAG | 1290 | CUAUUCCAUGUACCAAAAU |
| 4998-5016 | 1291 | AGUGCUGAAUAGGGAGGAA | 1292 | UUCCUCCCUAUUCAGCACU |
| 5070-5088 | 1293 | GAGGCCAGGGAAAUUCCCU | 1294 | AGGGAAUUUCCCUGGCCUC |
| 4158-4176 | 1295 | AGCUCAAAUUUUAUAUAAG | 1296 | CUUAUAUAAAAUUUGAGCU |
| 5065-5083 | 1297 | CAGGGAAAUUCCCUUGUUU | 1298 | AAACAAGGGAAUUUCCCUG |
| 2872-2890 | 1299 | UUGUGCAGUGGAAAGAAAG | 1300 | CUUUCUUUCCACUGCACAA |
| 4782-4800 | 1301 | UACAUGGAAUAGUUCAGAG | 1302 | CUCUGAACUAUUCCAUGUA |
| 4783-4801 | 1303 | GUACAUGGAAUAGUUCAGA | 1304 | UCUGAACUAUUCCAUGUAC |
| 5064-5082 | 1305 | AGGGAAAUUCCCUUGUUUU | 1306 | AAAACAAGGGAAUUUCCCU |
| 5071-5089 | 1307 | GGAGGCCAGGGAAAUUCCC | 1308 | GGGAAUUUCCCUGGCCUCC |
| 3951-3969 | 1309 | GUGUAGACAGCCAUAUGCA | 1310 | UGCAUAUGGCUGUCUACAC |
| 3949-3967 | 1311 | GUAGACAGCCAUAUGCAGU | 1312 | ACUGCAUAUGGCUGUCUAC |
| 4355-4373 | 1313 | GAAGACCUGUUUUGCCAUG | 1314 | CAUGGCAAAACAGGUCUUC |
| 4363-4381 | 1315 | AGUGGGAUGAAGACCUGUU | 1316 | AACAGGUCUUCAUCCCACU |
| 4356-4374 | 1317 | UGAAGACCUGUUUUGCCAU | 1318 | AUGGCAAAACAGGUCUUCA |
| 4361-4379 | 1319 | UGGGAUGAAGACCUGUUUU | 1320 | AAAACAGGUCUUCAUCCCA |
| 4560-4578 | 1321 | CUUAACCCAAGAAGCUCUU | 1322 | AAGAGCUUCUUGGGUUAAG |
| 2873-2891 | 1323 | AUUGUGCAGUGGAAAGAAA | 1324 | UUUCUUUCCACUGCACAAU |
| 4730-4748 | 1325 | CUUUAUUGCAAGGAAUGGC | 1326 | GCCAUUCCUUGCAAUAAAG |
| 3899-3917 | 1327 | GAGCAUGACUUUAACCCAG | 1328 | CUGGGUUAAAGUCAUGCUC |
| 4756-4774 | 1329 | GUGAUUUUCCUCCUAAUUC | 1330 | GAAUUAGGAGGAAAAUCAC |
| 4590-4608 | 1331 | UGAUUGCUUCAGACAAUGG | 1332 | CCAUUGUCUGAAGCAAUCA |
| 4159-4177 | 1333 | AAGCUCAAAUUUUAUAUAA | 1334 | UUAUAUAAAAUUUGAGCUU |
| 2743-2761 | 1335 | CUGGACAUGGAUCAAGCAC | 1336 | GUGCUUGAUCCAUGUCCAG |
| 4155-4173 | 1337 | UCAAAUUUUAUAUAAGAAA | 1338 | UUUCUUAUAUAAAAUUUGA |
| 2871-2889 | 1339 | UGUGCAGUGGAAAGAAAGG | 1340 | CCUUUCUUUCCACUGCACA |
| 4786-4804 | 1341 | UUGGUACAUGGAAUAGUUC | 1342 | GAACUAUUCCAUGUACCAA |
| 4364-4382 | 1343 | AAGUGGGAUGAAGACCUGU | 1344 | ACAGGUCUUCAUCCCACUU |
| 4359-4377 | 1345 | GGAUGAAGACCUGUUUUGC | 1346 | GCAAAACAGGUCUUCAUCC |
| 2744-2762 | 1347 | UCUGGACAUGGAUCAAGCA | 1348 | UGCUUGAUCCAUGUCCAGA |
| 4787-4805 | 1349 | UUUGGUACAUGGAAUAGUU | 1350 | AACUAUUCCAUGUACCAAA |

TABLE 14
Exemplary JC Virus unmodified dsRNAs

| Position | SEQ | | SEQ | |
|---|---|---|---|---|
| in | ID | Sequence | ID | Sequence |
| Consensus | NO: | (5′--> 3′) | NO: | (5′--> 3′) |
| 1426-1444 | 1351 | ACUUUUAGGGUUGUACGGG | 1352 | CCCGUACAACCCUAAAAGU |
| 1427-1445 | 1353 | CUUUUAGGGUUGUACGGGA | 1354 | UCCCGUACAACCCUAAAAG |
| 2026-2044 | 1355 | CAGAGCACAAGGCGUACCU | 1356 | AGGUACGCCUUGUGCUCUG |
| 1431-1449 | 1357 | UAGGGUUGUACGGGACUG | 1358 | ACAGUCCCGUACAACCCUA |
| 1432-1450 | 1359 | AGGGUUGUACGGGACUGUA | 1360 | UACAGUCCCGUACAACCCU |
| 1436-1454 | 1361 | UUGUACGGGACUGUAACAC | 1362 | GUGUUACAGUCCCGUACAA |
| 4794-4812 | 1363 | GCCUGAUUUUGGUACAUGG | 1364 | CCAUGUACCAAAAUCAGGC |
| 5099-5117 | 1365 | GAAGUAGUAAGGGCGUGGA | 1366 | UCCACGCCCUUACUACUUC |
| 713-731 | 1367 | AUAGGCCUUACUCCUGAAA | 1368 | UUUCAGGAGUAAGGCCUAU |
| 3946-3964 | 1369 | GACAGCCAUAUGCAGUAGU | 1370 | ACUACUGCAUAUGGCUGUC |
| 1128-1146 | 1371 | AAACUACUUGGGCAAUAGU | 1372 | ACUAUUGCCCAAGUAGUUU |
| 525-543 | 1373 | UCAGGUUCAUGGGUGCCGC | 1374 | GCGGCACCCAUGAACCUGA |
| 5096-5114 | 1375 | GUAGUAAGGGCGUGGAGGC | 1376 | GCCUCCACGCCCUUACUAC |
| 4727-4745 | 1377 | UAUUGCAAGGAAUGGCCUA | 1378 | UAGGCCAUUCCUUGCAAUA |
| 5097-5115 | 1379 | AGUAGUAAGGGCGUGGAGG | 1380 | CCUCCACGCCCUUACUACU |
| 4601-4619 | 1381 | UGCUAUUGCUUUGAUUGCU | 1382 | AGCAAUCAAAGCAAUAGCA |
| 4600-4618 | 1383 | GCUAUUGCUUUGAUUGCUU | 1384 | AAGCAAUCAAAGCAAUAGC |
| 1421-1439 | 1385 | CCUUUACUUUUAGGGUUGU | 1386 | ACAACCCUAAAAGUAAAGG |
| 1424-1442 | 1387 | UUACUUUUAGGGUUGUACG | 1388 | CGUACAACCCUAAAAGUAA |
| 1403-1421 | 1389 | GCUCCUCAAUGGAUGUUGC | 1390 | GCAACAUCCAUUGAGGAGC |
| 1534-1552 | 1391 | UUAUAAGAGGAGGAGUAGA | 1392 | UCUACUCCUCCUCUUAUAA |
| 5098-5116 | 1393 | AAGUAGUAAGGGCGUGGAG | 1394 | CUCCACGCCCUUACUACUU |
| 1430-1448 | 1395 | UUAGGGUUGUACGGGACUG | 1396 | CAGUCCCGUACAACCCUAA |
| 1701-1719 | 1397 | GACAUGCUUCCUUGUUACA | 1398 | UGUAACAAGGAAGCAUGUC |
| 2066-2084 | 1399 | UGUUGAAUGUUGGGUUCCU | 1400 | AGGAACCCAACAUUCAACA |
| 4561-4579 | 1401 | ACUUAACCCAAGAAGCUCUT | 1402 | AGAGCUUCUUGGGUUAAGU |
| 4797-4815 | 1403 | UCAGCCUGAUUUUGGUACA | 1404 | UGUACCAAAAUCAGGCUGA |
| 1428-1446 | 1405 | UUUUAGGGUUGUACGGGAC | 1406 | GUCCCGUACAACCCUAAAA |
| 1429-1447 | 1407 | UUUAGGGUUGUACGGGACU | 1408 | AGUCCCGUACAACCCUAAA |
| 662-680 | 1409 | UCCCUUGCUACUGUAGAGG | 1410 | CCUCUACAGUAGCAAGGGA |
| 663-681 | 1411 | CCCUUGCUACUGUAGAGGG | 1412 | CCCUCUACAGUAGCAAGGG |
| 1402-1420 | 1413 | UGCUCCUCAAUGGAUGUUG | 1414 | CAACAUCCAUUGAGGAGCA |
| 1398-1416 | 1415 | GAUCUGCUCCUCAAUGGAU | 1416 | AUCCAUUGAGGAGCAGAUC |
| 1399-1417 | 1417 | AUCUGCUCCUCAAUGGAUG | 1418 | CAUCCAUUGAGGAGCAGAU |
| 1400-1418 | 1419 | UCUGCUCCUCAAUGGAUGU | 1420 | ACAUCCAUUGAGGAGCAGA |
| 1401-1419 | 1421 | CUGCUCCUCAAUGGAUGUU | 1422 | AACAUCCAUUGAGGAGCAG |
| 1435-1453 | 1423 | GUUGUACGGGACUGUAACA | 1424 | UGUUACAGUCCCGUACAAC |
| 1437-1455 | 1425 | UGUACGGGACUGUAACACC | 1426 | GGUGUUACAGUCCCGUACA |
| 1438-1456 | 1427 | GUACGGGACUGUAACACCU | 1428 | AGGUGUUACAGUCCCGUAC |
| 4796-4814 | 1429 | CAGCCUGAUUUUGGUACAU | 1430 | AUGUACCAAAAUCAGGCUG |
| 4992-5010 | 1431 | GAAUAGGGAGGAAUCCAUG | 1432 | CAUGGAUUCCUCCCUAUUC |
| 4999-5017 | 1433 | AAGUGCUGAAUAGGGAGGA | 1434 | UCCUCCCUAUUCAGCACUU |
| 630-648 | 1435 | AGGCUGCUGCUACUAUAGA | 1436 | UCUAUAGUAGCAGCAGCCU |
| 3947-3965 | 1437 | AGACAGCCAUAUGCAGUAG | 1438 | CUACUGCAUAUGGCUGUCU |
| 524-542 | 1439 | UUCAGGUUCAUGGGUGCCG | 1440 | CGGCACCCAUGAACCUGAA |
| 3948-3966 | 1441 | UAGACAGCCAUAUGCAGUA | 1442 | UACUGCAUAUGGCUGUCUA |
| 3900-3918 | 1443 | GGAGCAUGACUUUAACCCA | 1444 | UGGGUUAAAGUCAUGCUCC |
| 1417-1435 | 1445 | GUUGCCUUUACUUUUAGGG | 1446 | CCCUAAAAGUAAAGGCAAC |
| 4565-4583 | 1447 | UGUGACUUAACCCAAGAAG | 1448 | CUUCUUGGGUUAAGUCACA |
| 4598-4616 | 1449 | UAUUGCUUUGAUUGCUUCA | 1450 | UGAAGCAAUCAAAGCAAUA |
| 2060-2078 | 1451 | AUAUCCUGUUGAAUGUUGG | 1452 | CCAACAUUCAACAGGAUAU |
| 4729-4747 | 1453 | UUUAUUGCAAGGAAUGGCC | 1454 | GGCCAUUCCUUGCAAUAAA |
| 1122-1140 | 1455 | UGGAAGAAACUACUUGGGC | 1456 | GCCCAAGUAGUUUCUUCCA |
| 4261-4279 | 1457 | AAGACCCUAAAGACUUUCC | 1458 | GGAAAGUCUUUAGGGUCUU |
| 1412-1430 | 1459 | UGGAUGUUGCCUUUACUUU | 1460 | AAAGUAAAGGCAACAUCCA |
| 4592-4610 | 1461 | UUUGAUUGCUUCAGACAAU | 1462 | AUUGUCUGAAGCAAUCAAA |
| 4991-5009 | 1463 | AAUAGGGAGGAAUCCAUGG | 1464 | CCAUGGAUUCCUCCCUAUU |
| 5004-5022 | 1465 | GGACAAAGUGCUGAAUAGG | 1466 | CCUAUUCAGCACUUUGUCC |
| 5005-5023 | 1467 | UGGACAAAGUGCUGAAUAG | 1468 | CUAUUCAGCACUUUGUCCA |
| 654-672 | 1469 | AAAUUGCAUCCCUUGCUAC | 1470 | GUAGCAAGGGAUGCAAUUU |
| 659-677 | 1471 | GCAUCCCUUGCUACUGUAG | 1472 | CUACAGUAGCAAGGGAUGC |
| 4273-4291 | 1473 | AAAAAAAGGUAGAAGACCC | 1474 | GGGUCUUCUACCUUUUUUU |
| 2025-2043 | 1475 | ACAGAGCACAAGGCGUACC | 1476 | GGUACGCCUUGUGCUCUGU |
| 4791-4809 | 1477 | UGAUUUUGGUACAUGGAAU | 1478 | AUUCCAUGUACCAAAAUCA |
| 1433-1451 | 1479 | GGGUUGUACGGGACUGUAA | 1480 | UUACAGUCCCGUACAACCC |
| 1434-1452 | 1481 | GGUUGUACGGGACUGUAAC | 1482 | GUUACAGUCCCGUACAACC |
| 1440-1458 | 1483 | ACGGGACUGUAACACCUGC | 1484 | GCAGGUGUUACAGUCCCGU |
| 1442-1460 | 1485 | GGGACUGUAACACCUGCUC | 1486 | GAGCAGGUGUUACAGUCCC |
| 1608-1626 | 1487 | ACUCCAGAAAUGGGUGACC | 1488 | GGUCACCCAUUUCUGGAGU |
| 4793-4811 | 1489 | CCUGAUUUUGGUACAUGGA | 1490 | UCCAUGUACCAAAAUCAGG |

TABLE 15
Exemplary JC Virus dsRNAs with NN-dinucleotide overhangs

| Position | SEQ | | | |
|---|---|---|---|---|
| in | ID | Sequence | SEQ ID | Sequence |
| Consensus | NO: | (5′--> 3′) | NO: | (5′--> 3′) |
| 1533-1551 | 1491 | CUUAUAAGAGGAGGAGUAGNN | 1492 | CUACUCCUCCUCUUAUAAGNN |
| 1703-1721 | 1493 | CAUGCUUCCUUGUUACAGUNN | 1494 | ACUGUAACAAGGAAGCAUGNN |
| 1439-1457 | 1495 | UACGGGACUGUAACACCUGNN | 1496 | CAGGUGUUACAGUCCCGUANN |
| 1705-1723 | 1497 | UGCUUCCUUGUUACAGUGUNN | 1498 | ACACUGUAACAAGGAAGCANN |
| 2064-2082 | 1499 | CCUGUUGAAUGUUGGGUUCNN | 1500 | GAACCCAACAUUCAACAGGNN |
| 2067-2085 | 1501 | GUUGAAUGUUGGGUUCCUGNN | 1502 | CAGGAACCCAACAUUCAACNN |
| 2071-2089 | 1503 | AAUGUUGGGUUCCUGAUCCNN | 1504 | GGAUCAGGAACCCAACAUUNN |
| 2121-2139 | 1505 | ACACUAACAGGAGGAGAAANN | 1506 | UUUCUCCUCCUGUUAGUGUNN |
| 1535-1553 | 1507 | UAUAAGAGGAGGAGUAGAANN | 1508 | UUCUACUCCUCCUCUUAUANN |
| 1536-1554 | 1509 | AUAAGAGGAGGAGUAGAAGNN | 1510 | CUUCUACUCCUCCUCUUAUNN |
| 1445-1463 | 1511 | ACUGUAACACCUGCUCUUGNN | 1512 | CAAGAGCAGGUGUUACAGUNN |
| 1700-1718 | 1513 | GGACAUGCUUCCUUGUUACNN | 1514 | GUAACAAGGAAGCAUGUCCNN |
| 1702-1720 | 1515 | ACAUGCUUCCUUGUUACAGNN | 1516 | CUGUAACAAGGAAGCAUGUNN |
| 1704-1722 | 1517 | AUGCUUCCUUGUUACAGUGNN | 1518 | CACUGUAACAAGGAAGCAUNN |
| 2065-2083 | 1519 | CUGUUGAAUGUUGGGUUCCNN | 1520 | GGAACCCAACAUUCAACAGNN |
| 2070-2088 | 1521 | GAAUGUUGGGUUCCUGAUCNN | 1522 | GAUCAGGAACCCAACAUUCNN |
| 1441-1459 | 1523 | CGGGACUGUAACACCUGCUNN | 1524 | AGCAGGUGUUACAGUCCCGNN |
| 1443-1461 | 1525 | GGACUGUAACACCUGCUCUNN | 1526 | AGAGCAGGUGUUACAGUCCNN |
| 1444-1462 | 1527 | GACUGUAACACCUGCUCUUNN | 1528 | AAGAGCAGGUGUUACAGUCNN |
| 1609-1627 | 1529 | CUCCAGAAAUGGGUGACCCNN | 1530 | GGGUCACCCAUUUCUGGAGNN |
| 1537-1555 | 1531 | UAAGAGGAGGAGUAGAAGUNN | 1532 | ACUUCUACUCCUCCUCUUANN |
| 629-647 | 1533 | GAGGCUGCUGCUACUAUAGNN | 1534 | CUAUAGUAGCAGCAGCCUCNN |
| 656-674 | 1535 | AUUGCAUCCCUUGCUACUGNN | 1536 | CAGUAGCAAGGGAUGCAAUNN |
| 658-676 | 1537 | UGCAUCCCUUGCUACUGUANN | 1538 | UACAGUAGCAAGGGAUGCANN |
| 517-535 | 1539 | UUGUGUUUUCAGGUUCAUGNN | 1540 | CAUGAACCUGAAAACACAANN |
| 559-577 | 1541 | GGACCUAGUUGCUACUGUUNN | 1542 | AACAGUAGCAACUAGGUCCNN |
| 591-609 | 1543 | CUGCCACAGGAUUUUCAGUNN | 1544 | ACUGAAAAUCCUGUGGCAGNN |
| 638-656 | 1545 | GCUACUAUAGAAGUUGAAANN | 1546 | UUUCAACUUCUAUAGUAGCNN |
| 655-673 | 1547 | AAUUGCAUCCCUUGCUACUNN | 1548 | AGUAGCAAGGGAUGCAAUUNN |
| 561-579 | 1549 | ACCUAGUUGCUACUGUUUCNN | 1550 | GAAACAGUAGCAACUAGGUNN |
| 639-657 | 1551 | CUACUAUAGAAGUUGAAAUNN | 1552 | AUUUCAACUUCUAUAGUAGNN |
| 715-733 | 1553 | AGGCCUUACUCCUGAAACANN | 1554 | UGUUUCAGGAGUAAGGCCUNN |
| 716-734 | 1555 | GGCCUUACUCCUGAAACAUNN | 1556 | AUGUUUCAGGAGUAAGGCCNN |
| 326-344 | 1557 | GUAAAACCUGGAGUGGAACNN | 1558 | GUUCCACUCCAGGUUUUACNN |
| 518-536 | 1559 | UGUGUUUUCAGGUUCAUGGNN | 1560 | CCAUGAACCUGAAAACACANN |
| 520-538 | 1561 | UGUUUUCAGGUUCAUGGGUNN | 1562 | ACCCAUGAACCUGAAAACANN |
| 661-679 | 1563 | AUCCCUUGCUACUGUAGAGNN | 1564 | CUCUACAGUAGCAAGGGAUNN |
| 560-578 | 1565 | GACCUAGUUGCUACUGUUUNN | 1566 | AAACAGUAGCAACUAGGUCNN |
| 681-699 | 1567 | GGAUUACAAGUACCUCUGANN | 1568 | UCAGAGGUACUUGUAAUCCNN |
| 714-732 | 1569 | UAGGCCUUACUCCUGAAACNN | 1570 | GUUUCAGGAGUAAGGCCUANN |
| 377-395 | 1571 | UGUUAGAAUUUUUGCUGGANN | 1572 | UCCAGCAAAAAUUCUAACANN |
| 589-607 | 1573 | UGCUGCCACAGGAUUUUCANN | 1574 | UGAAAAUCCUGUGGCAGCANN |
| 594-612 | 1575 | CCACAGGAUUUUCAGUAGCNN | 1576 | GCUACUGAAAAUCCUGUGGNN |
| 648-666 | 1577 | AAGUUGAAAUUGCAUCCCUNN | 1578 | AGGGAUGCAAUUUCAACUUNN |
| 649-667 | 1579 | AGUUGAAAUUGCAUCCCUUNN | 1580 | AAGGGAUGCAAUUUCAACUNN |
| 587-605 | 1581 | GCUGCUGCCACAGGAUUUUNN | 1582 | AAAAUCCUGUGGCAGCAGCNN |
| 325-343 | 1583 | AGUAAAACCUGGAGUGGAANN | 1584 | UUCCACUCCAGGUUUUACUNN |
| 515-533 | 1585 | UUUUGUGUUUUCAGGUUCANN | 1586 | UGAACCUGAAAACACAAAANN |
| 516-534 | 1587 | UUUGUGUUUUCAGGUUCAUNN | 1588 | AUGAACCUGAAAACACAAANN |
| 519-537 | 1589 | GUGUUUUCAGGUUCAUGGGNN | 1590 | CCCAUGAACCUGAAAACACNN |
| 521-539 | 1591 | GUUUUCAGGUUCAUGGGUGNN | 1592 | CACCCAUGAACCUGAAAACNN |
| 522-540 | 1593 | UUUUCAGGUUCAUGGGUGCNN | 1594 | GCACCCAUGAACCUGAAAANN |
| 523-541 | 1595 | UUUCAGGUUCAUGGGUGCCNN | 1596 | GGCACCCAUGAACCUGAAANN |
| 616-634 | 1597 | AAUUGCUGCUGGAGAGGCUNN | 1598 | AGCCUCUCCAGCAGCAAUUNN |
| 657-675 | 1599 | UUGCAUCCCUUGCUACUGUNN | 1600 | ACAGUAGCAAGGGAUGCAANN |
| 761-779 | 1601 | GCUGUAGCUGGGUUUGCUGNN | 1602 | CAGCAAACCCAGCUACAGCNN |
| 645-663 | 1603 | UAGAAGUUGAAAUUGCAUCNN | 1604 | GAUGCAAUUUCAACUUCUANN |
| 647-665 | 1605 | GAAGUUGAAAUUGCAUCCCNN | 1606 | GGGAUGCAAUUUCAACUUCNN |
| 660-678 | 1607 | CAUCCCUUGCUACUGUAGANN | 1608 | UCUACAGUAGCAAGGGAUGNN |
| 324-342 | 1609 | UAGUAAAACCUGGAGUGGANN | 1610 | UCCACUCCAGGUUUUACUANN |
| 372-390 | 1611 | UUUUUUGUUAGAAUUUUUGNN | 1612 | CAAAAAUUCUAACAAAAAANN |
| 640-658 | 1613 | UACUAUAGAAGUUGAAAUUNN | 1614 | AAUUUCAACUUCUAUAGUANN |
| 562-580 | 1615 | CCUAGUUGCUACUGUUUCUNN | 1616 | AGAAACAGUAGCAACUAGGNN |
| 563-581 | 1617 | CUAGUUGCUACUGUUUCUGNN | 1618 | CAGAAACAGUAGCAACUAGNN |
| 566-584 | 1619 | GUUGCUACUGUUUCUGAGGNN | 1620 | CCUCAGAAACAGUAGCAACNN |
| 625-643 | 1621 | UGGAGAGGCUGCUGCUACUNN | 1622 | AGUAGCAGCAGCCUCUCCANN |
| 627-645 | 1623 | GAGAGGCUGCUGCUACUAUNN | 1624 | AUAGUAGCAGCAGCCUCUCNN |
| 628-646 | 1625 | AGAGGCUGCUGCUACUAUANN | 1626 | UAUAGUAGCAGCAGCCUCUNN |
| 632-650 | 1627 | GCUGCUGCUACUAUAGAAGNN | 1628 | CUUCUAUAGUAGCAGCAGCNN |
| 513-531 | 1629 | UUUUUUGUGUUUUCAGGUUNN | 1630 | AACCUGAAAACACAAAAAANN |
| 641-659 | 1631 | ACUAUAGAAGUUGAAAUUGNN | 1632 | CAAUUUCAACUUCUAUAGUNN |
| 323-341 | 1633 | UUAGUAAAACCUGGAGUGGNN | 1634 | CCACUCCAGGUUUUACUAANN |
| 717-735 | 1635 | GCCUUACUCCUGAAACAUANN | 1636 | UAUGUUUCAGGAGUAAGGCNN |
| 646-664 | 1637 | AGAAGUUGAAAUUGCAUCCNN | 1638 | GGAUGCAAUUUCAACUUCUNN |
| 592-610 | 1639 | UGCCACAGGAUUUUCAGUANN | 1640 | UACUGAAAAUCCUGUGGCANN |
| 590-608 | 1641 | GCUGCCACAGGAUUUUCAGNN | 1642 | CUGAAAAUCCUGUGGCAGCNN |
| 526-544 | 1643 | CAGGUUCAUGGGUGCCGCANN | 1644 | UGCGGCACCCAUGAACCUGNN |
| 615-633 | 1645 | AAAUUGCUGCUGGAGAGGCNN | 1646 | GCCUCUCCAGCAGCAAUUUNN |
| 617-635 | 1647 | AUUGCUGCUGGAGAGGCUGNN | 1648 | CAGCCUCUCCAGCAGCAAUNN |
| 652-670 | 1649 | UGAAAUUGCAUCCCUUGCUNN | 1650 | AGCAAGGGAUGCAAUUUCANN |
| 374-392 | 1651 | UUUUGUUAGAAUUUUUGCUNN | 1652 | AGCAAAAAUUCUAACAAAANN |
| 375-393 | 1653 | UUUGUUAGAAUUUUUGCUGNN | 1654 | CAGCAAAAAUUCUAACAAANN |
| 631-649 | 1655 | GGCUGCUGCUACUAUAGAANN | 1656 | UUCUAUAGUAGCAGCAGCCNN |
| 376-394 | 1657 | UUGUUAGAAUUUUUGCUGGNN | 1658 | CCAGCAAAAAUUCUAACAANN |
| 512-530 | 1659 | UUUUUUUGUGUUUUCAGGUNN | 1660 | ACCUGAAAACACAAAAAAANN |
| 1127-1145 | 1661 | GAAACUACUUGGGCAAUAGNN | 1662 | CUAUUGCCCAAGUAGUUUCNN |
| 1410-1428 | 1663 | AAUGGAUGUUGCCUUUACUNN | 1664 | AGUAAAGGCAACAUCCAUUNN |
| 1406-1424 | 1665 | CCUCAAUGGAUGUUGCCUUNN | 1666 | AAGGCAACAUCCAUUGAGGNN |
| 1418-1436 | 1667 | UUGCCUUUACUUUUAGGGUNN | 1668 | ACCCUAAAAGUAAAGGCAANN |
| 1126-1144 | 1669 | AGAAACUACUUGGGCAAUANN | 1670 | UAUUGCCCAAGUAGUUUCUNN |
| 1125-1143 | 1671 | AAGAAACUACUUGGGCAAUNN | 1672 | AUUGCCCAAGUAGUUUCUUNN |
| 1419-1437 | 1673 | UGCCUUUACUUUUAGGGUUNN | 1674 | AACCCUAAAAGUAAAGGCANN |
| 1420-1438 | 1675 | GCCUUUACUUUUAGGGUUGNN | 1676 | CAACCCUAAAAGUAAAGGCNN |
| 1422-1440 | 1677 | CUUUACUUUUAGGGUUGUANN | 1678 | UACAACCCUAAAAGUAAAGNN |
| 1423-1441 | 1679 | UUUACUUUUAGGGUUGUACNN | 1680 | GUACAACCCUAAAAGUAAANN |
| 1425-1443 | 1681 | UACUUUUAGGGUUGUACGGNN | 1682 | CCGUACAACCCUAAAAGUANN |
| 1123-1141 | 1683 | GGAAGAAACUACUUGGGCANN | 1684 | UGCCCAAGUAGUUUCUUCCNN |
| 1409-1427 | 1685 | CAAUGGAUGUUGCCUUUACNN | 1686 | GUAAAGGCAACAUCCAUUGNN |
| 1413-1431 | 1687 | GGAUGUUGCCUUUACUUUUNN | 1688 | AAAAGUAAAGGCAACAUCCNN |
| 1416-1434 | 1689 | UGUUGCCUUUACUUUUAGGNN | 1690 | CCUAAAAGUAAAGGCAACANN |
| 1414-1432 | 1691 | GAUGUUGCCUUUACUUUUANN | 1692 | UAAAAGUAAAGGCAACAUCNN |
| 911-929 | 1693 | CCAGAAGACUACUAUGAUANN | 1694 | UAUCAUAGUAGUCUUCUGGNN |
| 910-928 | 1695 | UCCAGAAGACUACUAUGAUNN | 1696 | AUCAUAGUAGUCUUCUGGANN |
| 1120-1138 | 1697 | UUUGGAAGAAACUACUUGGNN | 1698 | CCAAGUAGUUUCUUCCAAANN |
| 1404-1422 | 1699 | CUCCUCAAUGGAUGUUGCCNN | 1700 | GGCAACAUCCAUUGAGGAGNN |
| 1337-1355 | 1701 | CCAAAUGUGCAAUCUGGUGNN | 1702 | CACCAGAUUGCACAUUUGGNN |
| 1338-1356 | 1703 | CAAAUGUGCAAUCUGGUGANN | 1704 | UCACCAGAUUGCACAUUUGNN |
| 1397-1415 | 1705 | AGAUCUGCUCCUCAAUGGANN | 1706 | UCCAUUGAGGAGCAGAUCUNN |
| 1407-1425 | 1707 | CUCAAUGGAUGUUGCCUUUNN | 1708 | AAAGGCAACAUCCAUUGAGNN |
| 4157-4175 | 1709 | GCUCAAAUUUUAUAUAAGANN | 1710 | UCUUAUAUAAAAUUUGAGCNN |
| 4795-4813 | 1711 | AGCCUGAUUUUGGUACAUGNN | 1712 | CAUGUACCAAAAUCAGGCUNN |
| 4156-4174 | 1713 | CUCAAAUUUUAUAUAAGAANN | 1714 | UUCUUAUAUAAAAUUUGAGNN |
| 5002-5020 | 1715 | ACAAAGUGCUGAAUAGGGANN | 1716 | UCCCUAUUCAGCACUUUGUNN |
| 4792-4810 | 1717 | CUGAUUUUGGUACAUGGAANN | 1718 | UUCCAUGUACCAAAAUCAGNN |
| 4790-4808 | 1719 | GAUUUUGGUACAUGGAAUANN | 1720 | UAUUCCAUGUACCAAAAUCNN |
| 4801-4819 | 1721 | CUCAUCAGCCUGAUUUUGGNN | 1722 | CCAAAAUCAGGCUGAUGAGNN |
| 4622-4640 | 1723 | AGCCCACUUGUGUGGAUAGNN | 1724 | CUAUCCACACAAGUGGGCUNN |
| 4997-5015 | 1725 | GUGCUGAAUAGGGAGGAAUNN | 1726 | AUUCCUCCCUAUUCAGCACNN |
| 5094-5112 | 1727 | AGUAAGGGCGUGGAGGCUUNN | 1728 | AAGCCUCCACGCCCUUACUNN |
| 4564-4582 | 1729 | GUGACUUAACCCAAGAAGCNN | 1730 | GCUUCUUGGGUUAAGUCACNN |
| 5095-5113 | 1731 | UAGUAAGGGCGUGGAGGCUNN | 1732 | AGCCUCCACGCCCUUACUANN |
| 4800-4818 | 1733 | UCAUCAGCCUGAUUUUGGUNN | 1734 | ACCAAAAUCAGGCUGAUGANN |
| 4265-4283 | 1735 | GUAGAAGACCCUAAAGACUNN | 1736 | AGUCUUUAGGGUCUUCUACNN |
| 4267-4285 | 1737 | AGGUAGAAGACCCUAAAGANN | 1738 | UCUUUAGGGUCUUCUACCUNN |
| 4270-4288 | 1739 | AAAAGGUAGAAGACCCUAANN | 1740 | UUAGGGUCUUCUACCUUUUNN |
| 4269-4287 | 1741 | AAAGGUAGAAGACCCUAAANN | 1742 | UUUAGGGUCUUCUACCUUUNN |
| 2874-2892 | 1743 | GAUUGUGCAGUGGAAAGAANN | 1744 | UUCUUUCCACUGCACAAUCNN |
| 2875-2893 | 1745 | GGAUUGUGCAGUGGAAAGANN | 1746 | UCUUUCCACUGCACAAUCCNN |
| 3950-3968 | 1747 | UGUAGACAGCCAUAUGCAGNN | 1748 | CUGCAUAUGGCUGUCUACANN |
| 3896-3914 | 1749 | CAUGACUUUAACCCAGAAGNN | 1750 | CUUCUGGGUUAAAGUCAUGNN |
| 4990-5008 | 1751 | AUAGGGAGGAAUCCAUGGANN | 1752 | UCCAUGGAUUCCUCCCUAUNN |
| 4994-5012 | 1753 | CUGAAUAGGGAGGAAUCCANN | 1754 | UGGAUUCCUCCCUAUUCAGNN |
| 5000-5018 | 1755 | AAAGUGCUGAAUAGGGAGGNN | 1756 | CCUCCCUAUUCAGCACUUUNN |
| 4563-4581 | 1757 | UGACUUAACCCAAGAAGCUNN | 1758 | AGCUUCUUGGGUUAAGUCANN |
| 3895-3913 | 1759 | AUGACUUUAACCCAGAAGANN | 1760 | UCUUCUGGGUUAAAGUCAUNN |
| 4262-4280 | 1761 | GAAGACCCUAAAGACUUUCNN | 1762 | GAAAGUCUUUAGGGUCUUCNN |
| 4162-4180 | 1763 | AAAAAGCUCAAAUUUUAUANN | 1764 | UAUAAAAUUUGAGCUUUUUNN |
| 4798-4816 | 1765 | AUCAGCCUGAUUUUGGUACNN | 1766 | GUACCAAAAUCAGGCUGAUNN |
| 4799-4817 | 1767 | CAUCAGCCUGAUUUUGGUANN | 1768 | UACCAAAAUCAGGCUGAUGNN |
| 5006-5024 | 1769 | AUGGACAAAGUGCUGAAUANN | 1770 | UAUUCAGCACUUUGUCCAUNN |
| 4264-4282 | 1771 | UAGAAGACCCUAAAGACUUNN | 1772 | AAGUCUUUAGGGUCUUCUANN |
| 4268-4286 | 1773 | AAGGUAGAAGACCCUAAAGNN | 1774 | CUUUAGGGUCUUCUACCUUNN |
| 4623-4641 | 1775 | CAGCCCACUUGUGUGGAUANN | 1776 | UAUCCACACAAGUGGGCUGNN |
| 4788-4806 | 1777 | UUUUGGUACAUGGAAUAGUNN | 1778 | ACUAUUCCAUGUACCAAAANN |
| 4993-5011 | 1779 | UGAAUAGGGAGGAAUCCAUNN | 1780 | AUGGAUUCCUCCCUAUUCANN |
| 4995-5013 | 1781 | GCUGAAUAGGGAGGAAUCCNN | 1782 | GGAUUCCUCCCUAUUCAGCNN |
| 4996-5014 | 1783 | UGCUGAAUAGGGAGGAAUCNN | 1784 | GAUUCCUCCCUAUUCAGCANN |
| 3952-3970 | 1785 | UGUGUAGACAGCCAUAUGCNN | 1786 | GCAUAUGGCUGUCUACACANN |
| 4595-4613 | 1787 | UGCUUUGAUUGCUUCAGACNN | 1788 | GUCUGAAGCAAUCAAAGCANN |
| 4596-4614 | 1789 | UUGCUUUGAUUGCUUCAGANN | 1790 | UCUGAAGCAAUCAAAGCAANN |
| 4597-4615 | 1791 | AUUGCUUUGAUUGCUUCAGNN | 1792 | CUGAAGCAAUCAAAGCAAUNN |
| 4599-4617 | 1793 | CUAUUGCUUUGAUUGCUUCNN | 1794 | GAAGCAAUCAAAGCAAUAGNN |
| 4726-4744 | 1795 | AUUGCAAGGAAUGGCCUAANN | 1796 | UUAGGCCAUUCCUUGCAAUNN |
| 4753-4771 | 1797 | AUUUUCCUCCUAAUUCUGANN | 1798 | UCAGAAUUAGGAGGAAAAUNN |
| 4802-4820 | 1799 | GCUCAUCAGCCUGAUUUUGNN | 1800 | CAAAAUCAGGCUGAUGAGCNN |
| 4803-4821 | 1801 | UGCUCAUCAGCCUGAUUUUNN | 1802 | AAAAUCAGGCUGAUGAGCANN |
| 4806-4824 | 1803 | AGUUGCUCAUCAGCCUGAUNN | 1804 | AUCAGGCUGAUGAGCAACUNN |
| 5091-5109 | 1805 | AAGGGCGUGGAGGCUUUUUNN | 1806 | AAAAAGCCUCCACGCCCUUNN |
| 5093-5111 | 1807 | GUAAGGGCGUGGAGGCUUUNN | 1808 | AAAGCCUCCACGCCCUUACNN |
| 4259-4277 | 1809 | GACCCUAAAGACUUUCCUGNN | 1810 | CAGGAAAGUCUUUAGGGUCNN |
| 3901-3919 | 1811 | AGGAGCAUGACUUUAACCCNN | 1812 | GGGUUAAAGUCAUGCUCCUNN |
| 4757-4775 | 1813 | UGUGAUUUUCCUCCUAAUUNN | 1814 | AAUUAGGAGGAAAAUCACANN |
| 4758-4776 | 1815 | UUGUGAUUUUCCUCCUAAUNN | 1816 | AUUAGGAGGAAAAUCACAANN |
| 4562-4580 | 1817 | GACUUAACCCAAGAAGCUCNN | 1818 | GAGCUUCUUGGGUUAAGUCNN |
| 4585-4603 | 1819 | GCUUCAGACAAUGGUUUGGNN | 1820 | CCAAACCAUUGUCUGAAGCNN |
| 4587-4605 | 1821 | UUGCUUCAGACAAUGGUUUNN | 1822 | AAACCAUUGUCUGAAGCAANN |
| 4588-4606 | 1823 | AUUGCUUCAGACAAUGGUUNN | 1824 | AACCAUUGUCUGAAGCAAUNN |
| 4591-4609 | 1825 | UUGAUUGCUUCAGACAAUGNN | 1826 | CAUUGUCUGAAGCAAUCAANN |
| 5003-5021 | 1827 | GACAAAGUGCUGAAUAGGGNN | 1828 | CCCUAUUCAGCACUUUGUCNN |
| 4165-4183 | 1829 | AAGAAAAAGCUCAAAUUUUNN | 1830 | AAAAUUUGAGCUUUUUCUUNN |
| 4166-4184 | 1831 | AAAGAAAAAGCUCAAAUUUNN | 1832 | AAAUUUGAGCUUUUUCUUUNN |
| 4263-4281 | 1833 | AGAAGACCCUAAAGACUUUNN | 1834 | AAAGUCUUUAGGGUCUUCUNN |
| 4274-4292 | 1835 | AAAAAAAAGGUAGAAGACCNN | 1836 | GGUCUUCUACCUUUUUUUUNN |
| 4266-4284 | 1837 | GGUAGAAGACCCUAAAGACNN | 1838 | GUCUUUAGGGUCUUCUACCNN |
| 4272-4290 | 1839 | AAAAAAGGUAGAAGACCCUNN | 1840 | AGGGUCUUCUACCUUUUUUNN |
| 4271-4289 | 1841 | AAAAAGGUAGAAGACCCUANN | 1842 | UAGGGUCUUCUACCUUUUUNN |
| 4559-4577 | 1843 | UUAACCCAAGAAGCUCUUCNN | 1844 | GAAGAGCUUCUUGGGUUAANN |
| 4789-4807 | 1845 | AUUUUGGUACAUGGAAUAGNN | 1846 | CUAUUCCAUGUACCAAAAUNN |
| 4998-5016 | 1847 | AGUGCUGAAUAGGGAGGAANN | 1848 | UUCCUCCCUAUUCAGCACUNN |
| 5070-5088 | 1849 | GAGGCCAGGGAAAUUCCCUNN | 1850 | AGGGAAUUUCCCUGGCCUCNN |
| 4158-4176 | 1851 | AGCUCAAAUUUUAUAUAAGNN | 1852 | CUUAUAUAAAAUUUGAGCUNN |
| 5065-5083 | 1853 | CAGGGAAAUUCCCUUGUUUNN | 1854 | AAACAAGGGAAUUUCCCUGNN |
| 2872-2890 | 1855 | UUGUGCAGUGGAAAGAAAGNN | 1856 | CUUUCUUUCCACUGCACAANN |
| 4782-4800 | 1857 | UACAUGGAAUAGUUCAGAGNN | 1858 | CUCUGAACUAUUCCAUGUANN |
| 4783-4801 | 1859 | GUACAUGGAAUAGUUCAGANN | 1860 | UCUGAACUAUUCCAUGUACNN |
| 5064-5082 | 1861 | AGGGAAAUUCCCUUGUUUUNN | 1862 | AAAACAAGGGAAUUUCCCUNN |
| 5071-5089 | 1863 | GGAGGCCAGGGAAAUUCCCNN | 1864 | GGGAAUUUCCCUGGCCUCCNN |
| 3951-3969 | 1865 | GUGUAGACAGCCAUAUGCANN | 1866 | UGCAUAUGGCUGUCUACACNN |
| 3949-3967 | 1867 | GUAGACAGCCAUAUGCAGUNN | 1868 | ACUGCAUAUGGCUGUCUACNN |
| 4355-4373 | 1869 | GAAGACCUGUUUUGCCAUGNN | 1870 | CAUGGCAAAACAGGUCUUCNN |
| 4363-4381 | 1871 | AGUGGGAUGAAGACCUGUUNN | 1872 | AACAGGUCUUCAUCCCACUNN |
| 4356-4374 | 1873 | UGAAGACCUGUUUUGCCAUNN | 1874 | AUGGCAAAACAGGUCUUCANN |
| 4361-4379 | 1875 | UGGGAUGAAGACCUGUUUUNN | 1876 | AAAACAGGUCUUCAUCCCANN |
| 4560-4578 | 1877 | CUUAACCCAAGAAGCUCUUNN | 1878 | AAGAGCUUCUUGGGUUAAGNN |
| 2873-2891 | 1879 | AUUGUGCAGUGGAAAGAAANN | 1880 | UUUCUUUCCACUGCACAAUNN |
| 4730-4748 | 1881 | CUUUAUUGCAAGGAAUGGCNN | 1882 | GCCAUUCCUUGCAAUAAAGNN |
| 3899-3917 | 1883 | GAGCAUGACUUUAACCCAGNN | 1884 | CUGGGUUAAAGUCAUGCUCNN |
| 4756-4774 | 1885 | GUGAUUUUCCUCCUAAUUCNN | 1886 | GAAUUAGGAGGAAAAUCACNN |
| 4590-4608 | 1887 | UGAUUGCUUCAGACAAUGGNN | 1888 | CCAUUGUCUGAAGCAAUCANN |
| 4159-4177 | 1889 | AAGCUCAAAUUUUAUAUAANN | 1890 | UUAUAUAAAAUUUGAGCUUNN |
| 2743-2761 | 1891 | CUGGACAUGGAUCAAGCACNN | 1892 | GUGCUUGAUCCAUGUCCAGNN |
| 4155-4173 | 1893 | UCAAAUUUUAUAUAAGAAANN | 1894 | UUUCUUAUAUAAAAUUUGANN |
| 2871-2889 | 1895 | UGUGCAGUGGAAAGAAAGGNN | 1896 | CCUUUCUUUCCACUGCACANN |
| 4786-4804 | 1897 | UUGGUACAUGGAAUAGUUCNN | 1898 | GAACUAUUCCAUGUACCAANN |
| 4364-4382 | 1899 | AAGUGGGAUGAAGACCUGUNN | 1900 | ACAGGUCUUCAUCCCACUUNN |
| 4359-4377 | 1901 | GGAUGAAGACCUGUUUUGCNN | 1902 | GCAAAACAGGUCUUCAUCCNN |
| 2744-2762 | 1903 | UCUGGACAUGGAUCAAGCANN | 1904 | UGCUUGAUCCAUGUCCAGANN |
| 4787-4805 | 1905 | UUUGGUACAUGGAAUAGUUNN | 1906 | AACUAUUCCAUGUACCAAANN |

TABLE 16
Exemplary JC Virus dsRNAs with NN-dinucleotide overhangs

| Position | SEQ | | SEQ | |
|---|---|---|---|---|
| in | ID | Sequence | ID | Sequence |
| Consensus | NO: | (5′--> 3′) | NO: | (5′--> 3′) |
| 1426-1444 | 1907 | ACUUUUAGGGUUGUACGGGNN | 1908 | CCCGUACAACCCUAAAAGUNN |
| 1427-1445 | 1909 | CUUUUAGGGUUGUACGGGANN | 1910 | UCCCGUACAACCCUAAAAGNN |
| 2026-2044 | 1911 | CAGAGCACAAGGCGUACCUNN | 1912 | AGGUACGCCUUGUGCUCUGNN |
| 1431-1449 | 1913 | UAGGGUUGUACGGGACUGNN | 1914 | ACAGUCCCGUACAACCCUANN |
| 1432-1450 | 1915 | AGGGUUGUACGGGACUGUANN | 1916 | UACAGUCCCGUACAACCCUNN |
| 1436-1454 | 1917 | UUGUACGGGACUGUAACACNN | 1918 | GUGUUACAGUCCCGUACAANN |
| 4794-4812 | 1919 | GCCUGAUUUUGGUACAUGGNN | 1920 | CCAUGUACCAAAAUCAGGCNN |
| 5099-5117 | 1921 | GAAGUAGUAAGGGCGUGGANN | 1922 | UCCACGCCCUUACUACUUCNN |
| 713-731 | 1923 | AUAGGCCUUACUCCUGAAANN | 1924 | UUUCAGGAGUAAGGCCUAUNN |
| 3946-3964 | 1925 | GACAGCCAUAUGCAGUAGUNN | 1926 | ACUACUGCAUAUGGCUGUCNN |
| 1128-1146 | 1927 | AAACUACUUGGGCAAUAGUNN | 1928 | ACUAUUGCCCAAGUAGUUUNN |
| 525-543 | 1929 | UCAGGUUCAUGGGUGCCGCNN | 1930 | GCGGCACCCAUGAACCUGANN |
| 5096-5114 | 1931 | GUAGUAAGGGCGUGGAGGCNN | 1932 | GCCUCCACGCCCUUACUACNN |
| 4727-4745 | 1933 | UAUUGCAAGGAAUGGCCUANN | 1934 | UAGGCCAUUCCUUGCAAUANN |
| 5097-5115 | 1935 | AGUAGUAAGGGCGUGGAGGNN | 1936 | CCUCCACGCCCUUACUACUNN |
| 4601-4619 | 1937 | UGCUAUUGCUUUGAUUGCUNN | 1938 | AGCAAUCAAAGCAAUAGCANN |
| 4600-4618 | 1939 | GCUAUUGCUUUGAUUGCUUNN | 1940 | AAGCAAUCAAAGCAAUAGCNN |
| 1421-1439 | 1941 | CCUUUACUUUUAGGGUUGUNN | 1942 | ACAACCCUAAAAGUAAAGGNN |
| 1424-1442 | 1943 | UUACUUUUAGGGUUGUACGNN | 1944 | CGUACAACCCUAAAAGUAANN |
| 1403-1421 | 1945 | GCUCCUCAAUGGAUGUUGCNN | 1946 | GCAACAUCCAUUGAGGAGCNN |
| 5098-5116 | 1947 | AAGUAGUAAGGGCGUGGAGNN | 1948 | CUCCACGCCCUUACUACUUNN |
| 1430-1448 | 1949 | UUAGGGUUGUACGGGACUGNN | 1950 | CAGUCCCGUACAACCCUAANN |
| 1701-1719 | 1951 | GACAUGCUUCCUUGUUACANN | 1952 | UGUAACAAGGAAGCAUGUCNN |
| 2066-2084 | 1953 | UGUUGAAUGUUGGGUUCCUNN | 1954 | AGGAACCCAACAUUCAACANN |
| 4561-4579 | 1955 | ACUUAACCCAAGAAGCUCUNN | 1956 | AGAGCUUCUUGGGUUAAGUNN |
| 4797-4815 | 1957 | UCAGCCUGAUUUUGGUACANN | 1958 | UGUACCAAAAUCAGGCUGANN |
| 1428-1446 | 1959 | UUUUAGGGUUGUACGGGACNN | 1960 | GUCCCGUACAACCCUAAAANN |
| 1429-1447 | 1961 | UUUAGGGUUGUACGGGACUNN | 1962 | AGUCCCGUACAACCCUAAANN |
| 662-680 | 1963 | UCCCUUGCUACUGUAGAGGNN | 1964 | CCUCUACAGUAGCAAGGGANN |
| 663-681 | 1965 | CCCUUGCUACUGUAGAGGGNN | 1966 | CCCUCUACAGUAGCAAGGGNN |
| 1402-1420 | 1967 | UGCUCCUCAAUGGAUGUUGNN | 1968 | CAACAUCCAUUGAGGAGCANN |
| 1398-1416 | 1969 | GAUCUGCUCCUCAAUGGAUNN | 1970 | AUCCAUUGAGGAGCAGAUCNN |
| 1399-1417 | 1971 | AUCUGCUCCUCAAUGGAUGNN | 1972 | CAUCCAUUGAGGAGCAGAUNN |
| 1400-1418 | 1973 | UCUGCUCCUCAAUGGAUGUNN | 1974 | ACAUCCAUUGAGGAGCAGANN |
| 1401-1419 | 1975 | CUGCUCCUCAAUGGAUGUUNN | 1976 | AACAUCCAUUGAGGAGCAGNN |
| 1435-1453 | 1977 | GUUGUACGGGACUGUAACANN | 1978 | UGUUACAGUCCCGUACAACNN |
| 1437-1455 | 1979 | UGUACGGGACUGUAACACCNN | 1980 | GGUGUUACAGUCCCGUACANN |
| 1438-1456 | 1981 | GUACGGGACUGUAACACCUNN | 1982 | AGGUGUUACAGUCCCGUACNN |
| 4796-4814 | 1983 | CAGCCUGAUUUUGGUACAUNN | 1984 | AUGUACCAAAAUCAGGCUGNN |
| 4992-5010 | 1985 | GAAUAGGGAGGAAUCCAUGNN | 1986 | CAUGGAUUCCUCCCUAUUCNN |
| 4999-5017 | 1987 | AAGUGCUGAAUAGGGAGGANN | 1988 | UCCUCCCUAUUCAGCACUUNN |
| 630-648 | 1989 | AGGCUGCUGCUACUAUAGANN | 1990 | UCUAUAGUAGCAGCAGCCUNN |
| 3947-3965 | 1991 | AGACAGCCAUAUGCAGUAGNN | 1992 | CUACUGCAUAUGGCUGUCUNN |
| 524-542 | 1993 | UUCAGGUUCAUGGGUGCCGNN | 1994 | CGGCACCCAUGAACCUGAANN |
| 3948-3966 | 1995 | UAGACAGCCAUAUGCAGUANN | 1996 | UACUGCAUAUGGCUGUCUANN |
| 3900-3918 | 1997 | GGAGCAUGACUUUAACCCANN | 1998 | UGGGUUAAAGUCAUGCUCCNN |
| 1417-1435 | 1999 | GUUGCCUUUACUUUUAGGGNN | 2000 | CCCUAAAAGUAAAGGCAACNN |
| 4565-4583 | 2001 | UGUGACUUAACCCAAGAAGNN | 2002 | CUUCUUGGGUUAAGUCACANN |
| 4598-4616 | 2003 | UAUUGCUUUGAUUGCUUCANN | 2004 | UGAAGCAAUCAAAGCAAUANN |
| 2060-2078 | 2005 | AUAUCCUGUUGAAUGUUGGNN | 2006 | CCAACAUUCAACAGGAUAUNN |
| 4729-4747 | 2007 | UUUAUUGCAAGGAAUGGCCNN | 2008 | GGCCAUUCCUUGCAAUAAANN |
| 1122-1140 | 2009 | UGGAAGAAACUACUUGGGCNN | 2010 | GCCCAAGUAGUUUCUUCCANN |
| 4261-4279 | 2011 | AAGACCCUAAAGACUUUCCNN | 2012 | GGAAAGUCUUUAGGGUCUUNN |
| 1412-1430 | 2013 | UGGAUGUUGCCUUUACUUUNN | 2014 | AAAGUAAAGGCAACAUCCANN |
| 4592-4610 | 2015 | UUUGAUUGCUUCAGACAAUNN | 2016 | AUUGUCUGAAGCAAUCAAANN |
| 4991-5009 | 2017 | AAUAGGGAGGAAUCCAUGGNN | 2018 | CCAUGGAUUCCUCCCUAUUNN |
| 5004-5022 | 2019 | GGACAAAGUGCUGAAUAGGNN | 2020 | CCUAUUCAGCACUUUGUCCNN |
| 5005-5023 | 2021 | UGGACAAAGUGCUGAAUAGNN | 2022 | CUAUUCAGCACUUUGUCCANN |
| 654-672 | 2023 | AAAUUGCAUCCCUUGCUACNN | 2024 | GUAGCAAGGGAUGCAAUUUNN |
| 659-677 | 2025 | GCAUCCCUUGCUACUGUAGNN | 2026 | CUACAGUAGCAAGGGAUGCNN |
| 4273-4291 | 2027 | AAAAAAAGGUAGAAGACCCNN | 2028 | GGGUCUUCUACCUUUUUUUNN |
| 2025-2043 | 2029 | ACAGAGCACAAGGCGUACCNN | 2030 | GGUACGCCUUGUGCUCUGUNN |
| 4791-4809 | 2031 | UGAUUUUGGUACAUGGAAUNN | 2032 | AUUCCAUGUACCAAAAUCANN |
| 1433-1451 | 2033 | GGGUUGUACGGGACUGUAANN | 2034 | UUACAGUCCCGUACAACCCNN |
| 1434-1452 | 2035 | GGUUGUACGGGACUGUAACNN | 2036 | GUUACAGUCCCGUACAACCNN |
| 1440-1458 | 2037 | ACGGGACUGUAACACCUGCNN | 2038 | GCAGGUGUUACAGUCCCGUNN |
| 1442-1460 | 2039 | GGGACUGUAACACCUGCUCNN | 2040 | GAGCAGGUGUUACAGUCCCNN |
| 1608-1626 | 2041 | ACUCCAGAAAUGGGUGACCNN | 2042 | GGUCACCCAUUUCUGGAGUNN |
| 4793-4811 | 2043 | CCUGAUUUUGGUACAUGGANN | 2044 | UCCAUGUACCAAAAUCAGGNN |

TABLE 17
Sequence of unmodified CNPase dsRNAs

| SEQ | | | |
|---|---|---|---|
| ID | | | |
| NO: | Sense (5′ to 3′) | SEQ ID NO: | Antisense (5′ to 3′) |
| 2057 | GGCCUUGACCUCUUAGAGA | 2058 | UCUCUAAGAGGUCAAGGCC |
| 2059 | GGCCUUGACCUCUUAGAGA | 2060 | UCUCUAAGAGGUCAAGGCC |
| 2061 | GGCCUUGACCUCUUAGAGA | 2062 | UCUCUAAGAGGUCAAGGCC |
| 2063 | GGCCUUGACCUCUUAGAGA | 2064 | UCUCUAAGAGGUCAAGGCC |
| 2065 | GGCCUUGACCUCUUAGAGAUUUU | 2066 | AAAAUCUCUAAGAGGUCAAGGCCUG |
| 2067 | GGCCUUGACCUCUUAGAGA | 2068 | UCUCUAAGAGGUCAAGGCC |
| 2069 | GGGCAAGCUCUAUUCCUUG | 2070 | CAAGGAAUAGAGCUUGCCC |
| 2071 | GCCUUGACCUCUUAGAGAU | 2072 | AUCUCUAAGAGGUCAAGGC |
| 2073 | CCUUGACCUCUUAGAGAUU | 2074 | AAUCUCUAAGAGGUCAAGG |

TABLE 18
Sequences of CNPase NN-dinucleotide modified dsRNAs.

| SEQ | | SEQ | |
|---|---|---|---|
| ID | | ID | |
| NO: | Sense (5′ to 3′) | NO: | Antisense (5′ to 3′) |
| 2075 | GGCCUUGACCUCUUAGAGANN | 2076 | UCUCUAAGAGGUCAAGGCCNN |
| 2077 | GGCCUUGACCUCUUAGAGANN | 2078 | UCUCUAAGAGGUCAAGGCCNN |
| 2079 | GGCCUUGACCUCUUAGAGANN | 2080 | UCUCUAAGAGGUCAAGGCCNN |
| 2081 | GGCCUUGACCUCUUAGAGANN | 2082 | UCUCUAAGAGGUCAAGGCCNN |
| 2083 | GGCCUUGACCUCUUAGAGAUUUUNN | 2084 | AAAAUCUCUAAGAGGUCAAGGCCUGNN |
| 2085 | GGCCUUGACCUCUUAGAGANN | 2086 | UCUCUAAGAGGUCAAGGCCNN |
| 2087 | GGGCAAGCUCUAUUCCUUGNN | 2088 | CAAGGAAUAGAGCUUGCCCNN |
| 2089 | GCCUUGACCUCUUAGAGAUNN | 2090 | AUCUCUAAGAGGUCAAGGCNN |
| 2091 | CCUUGACCUCUUAGAGAUUNN | 2092 | AAUCUCUAAGAGGUCAAGGNN |

TABLE 19
Sequences of modified CNPase dsRNAs.

| | | SEQ | | | SEQ | |
|---|---|---|---|---|---|---|
| Duplex | Strand | ID | | Strand | ID | |
| Name | ID: | NO: | Sense (5′ to 3′) | ID: | NO: | Antisense (5′ to 3′) |
| AD-12436 | AL-20068 | 2096 | GGccuuGAccucuuAGAGATsT | AL-20069 | 2095 | UCUCuAAGAGGUcAAGGCCTsT |
| AD-12449 | AL-20094 | 2098 | GGGcAAGcucuAuuccuuGTsT | AL-20095 | 2097 | cAAGGAAuAGAGCUUGCCCTsT |
| AD-12441 | AL-20078 | 2100 | GccuuGAccucuuAGAGAuTsT | AL-20079 | 2099 | AUCUCuAAGAGGUcAAGGCTsT |
| AD-12438 | AL-20072 | 2102 | ccuuGAccucuuAGAGAuuTsT | AL-20073 | 2101 | AAUCUCuAAGAGGUcAAGGTsT |

[0245] Other embodiments are in the claims.

The application's sequence listing, which the Patent Office published only in electronic form, follows.

SEQUENCE LISTING (2106 sequences)

SEQ ID NO: 1 - DNA, 21 bp, Artificial Sequence
  source: /note="Description of Combined DNA/RNA Molecule: Synthetic oligonucleotide"
  source: /note="Description of Artificial Sequence: Synthetic oligonucleotide"
acuuuuaggguuguacgggtt

SEQ ID NO: 2 - DNA, 21 bp, Artificial Sequence
  source: /note="Description of Combined DNA/RNA Molecule: Synthetic oligonucleotide"
  source: /note="Description of Artificial Sequence: Synthetic oligonucleotide"
cccguacaacccuaaaagutt

SEQ ID NO: 3 - DNA, 21 bp, Artificial Sequence
  source: /note="Description of Combined DNA/RNA Molecule: Synthetic oligonucleotide"
  source: /note="Description of Artificial Sequence: Synthetic oligonucleotide"
acuuuuaggguuguacgggtt

SEQ ID NO: 4 - DNA, 21 bp, Artificial Sequence
  source: /note="Description of Combined DNA/RNA Molecule: Synthetic oligonucleotide"
  source: /note="Description of Artificial Sequence: Synthetic oligonucleotide"
cccguacaacccuaaaagutt

SEQ ID NO: 5 - DNA, 21 bp, Artificial Sequence
  source: /note="Description of Combined DNA/RNA Molecule: Synthetic oligonucleotide"
  source: /note="Description of Artificial Sequence: Synthetic oligonucleotide"
cuuuuaggguuguacgggatt

SEQ ID NO: 6 - DNA, 21 bp, Artificial Sequence
  source: /note="Description of Combined DNA/RNA Molecule: Synthetic oligonucleotide"
  source: /note="Description of Artificial Sequence: Synthetic oligonucleotide"
ucccguacaacccuaaaagtt

SEQ ID NO: 7 - DNA, 21 bp, Artificial Sequence
  source: /note="Description of Combined DNA/RNA Molecule: Synthetic oligonucleotide"
  source: /note="Description of Artificial Sequence: Synthetic oligonucleotide"
cuuuuaggguuguacgggatt

SEQ ID NO: 8 - DNA, 21 bp, Artificial Sequence
  source: /note="Description of Combined DNA/RNA Molecule: Synthetic oligonucleotide"
  source: /note="Description of Artificial Sequence: Synthetic oligonucleotide"
ucccguacaacccuaaaagtt

SEQ ID NO: 9 - DNA, 21 bp, Artificial Sequence
  source: /note="Description of Combined DNA/RNA Molecule: Synthetic oligonucleotide"
  source: /note="Description of Artificial Sequence: Synthetic oligonucleotide"
cagagcacaaggcguaccutt

SEQ ID NO: 10 - DNA, 21 bp, Artificial Sequence
  source: /note="Description of Combined DNA/RNA Molecule: Synthetic oligonucleotide"
  source: /note="Description of Artificial Sequence: Synthetic oligonucleotide"
agguacgccuugugcucugtt

SEQ ID NO: 11 - DNA, 21 bp, Artificial Sequence
  source: /note="Description of Combined DNA/RNA Molecule: Synthetic oligonucleotide"
  source: /note="Description of Artificial Sequence: Synthetic oligonucleotide"
cagagcacaaggcguaccutt

SEQ ID NO: 12 - DNA, 21 bp, Artificial Sequence
  source: /note="Description of Combined DNA/RNA Molecule: Synthetic oligonucleotide"
  source: /note="Description of Artificial Sequence: Synthetic oligonucleotide"
agguacgccuugugcucugtt

SEQ ID NO: 13 - DNA, 21 bp, Artificial Sequence
  source: /note="Description of Combined DNA/RNA Molecule: Synthetic oligonucleotide"
  source: /note="Description of Artificial Sequence: Synthetic oligonucleotide"
cagagcacaaggcguaccutt

SEQ ID NO: 14 - DNA, 21 bp, Artificial Sequence
  source: /note="Description of Combined DNA/RNA Molecule: Synthetic oligonucleotide"
  source: /note="Description of Artificial Sequence: Synthetic oligonucleotide"
agguacgccuugugcucugtt

SEQ ID NO: 15 - DNA, 21 bp, Artificial Sequence
  source: /note="Description of Combined DNA/RNA Molecule: Synthetic oligonucleotide"
  source: /note="Description of Artificial Sequence: Synthetic oligonucleotide"
cagagcacaaggcguaccutt

SEQ ID NO: 16 - DNA, 21 bp, Artificial Sequence
  source: /note="Description of Combined DNA/RNA Molecule: Synthetic oligonucleotide"
  source: /note="Description of Artificial Sequence: Synthetic oligonucleotide"
agguacgccuugugcucugtt

SEQ ID NO: 17 - DNA, 21 bp, Artificial Sequence
  source: /note="Description of Combined DNA/RNA Molecule: Synthetic oligonucleotide"
  source: /note="Description of Artificial Sequence: Synthetic oligonucleotide"
uaggguuguacgggacugutt

SEQ ID NO: 18 - DNA, 21 bp, Artificial Sequence
  source: /note="Description of Combined DNA/RNA Molecule: Synthetic oligonucleotide"
  source: /note="Description of Artificial Sequence: Synthetic oligonucleotide"
acagucccguacaacccuatt

SEQ ID NO: 19 - DNA, 21 bp, Artificial Sequence
  source: /note="Description of Combined DNA/RNA Molecule: Synthetic oligonucleotide"
  source: /note="Description of Artificial Sequence: Synthetic oligonucleotide"
uaggguuguacgggacugutt

SEQ ID NO: 20 - DNA, 21 bp, Artificial Sequence
  source: /note="Description of Combined DNA/RNA Molecule: Synthetic oligonucleotide"
  source: /note="Description of Artificial Sequence: Synthetic oligonucleotide"
acagucccguacaacccuatt

SEQ ID NO: 21 - DNA, 21 bp, Artificial Sequence
  source: /note="Description of Combined DNA/RNA Molecule: Synthetic oligonucleotide"
  source: /note="Description of Artificial Sequence: Synthetic oligonucleotide"
aggguuguacgggacuguatt

SEQ ID NO: 22 - DNA, 21 bp, Artificial Sequence
  source: /note="Description of Combined DNA/RNA Molecule: Synthetic oligonucleotide"
  source: /note="Description of Artificial Sequence: Synthetic oligonucleotide"
uacagucccguacaacccutt

SEQ ID NO: 23 - DNA, 21 bp, Artificial Sequence
  source: /note="Description of Combined DNA/RNA Molecule: Synthetic oligonucleotide"
  source: /note="Description of Artificial Sequence: Synthetic oligonucleotide"
aggguuguacgggacuguatt

SEQ ID NO: 24 - DNA, 21 bp, Artificial Sequence
  source: /note="Description of Combined DNA/RNA Molecule: Synthetic oligonucleotide"
  source: /note="Description of Artificial Sequence: Synthetic oligonucleotide"
uacagucccguacaacccutt

SEQ ID NO: 25 - DNA, 21 bp, Artificial Sequence
  source: /note="Description of Combined DNA/RNA Molecule: Synthetic oligonucleotide"
  source: /note="Description of Artificial Sequence: Synthetic oligonucleotide"
aggguuguacgggacuguatt

SEQ ID NO: 26 - DNA, 21 bp, Artificial Sequence
  source: /note="Description of Combined DNA/RNA Molecule: Synthetic oligonucleotide"
  source: /note="Description of Artificial Sequence: Synthetic oligonucleotide"
uacagucccguacaacccutt

SEQ ID NO: 27 - DNA, 21 bp, Artificial Sequence
  source: /note="Description of Combined DNA/RNA Molecule: Synthetic oligonucleotide"
  source: /note="Description of Artificial Sequence: Synthetic oligonucleotide"
aggguuguacgggacuguatt

SEQ ID NO: 28 - DNA, 21 bp, Artificial Sequence
  source: /note="Description of Combined DNA/RNA Molecule: Synthetic oligonucleotide"
  source: /note="Description of Artificial Sequence: Synthetic oligonucleotide"
uacagucccguacaacccutt

SEQ ID NO: 29 - DNA, 21 bp, Artificial Sequence
  source: /note="Description of Combined DNA/RNA Molecule: Synthetic oligonucleotide"
  source: /note="Description of Artificial Sequence: Synthetic oligonucleotide"
uuguacgggacuguaacactt

SEQ ID NO: 30 - DNA, 21 bp, Artificial Sequence
  source: /note="Description of Combined DNA/RNA Molecule: Synthetic oligonucleotide"
  source: /note="Description of Artificial Sequence: Synthetic oligonucleotide"
guguuacagucccguacaatt

SEQ ID NO: 31 - DNA, 21 bp, Artificial Sequence
  source: /note="Description of Combined DNA/RNA Molecule: Synthetic oligonucleotide"
  source: /note="Description of Artificial Sequence: Synthetic oligonucleotide"
uuguacgggacuguaacactt

SEQ ID NO: 32 - DNA, 21 bp, Artificial Sequence
  source: /note="Description of Combined DNA/RNA Molecule: Synthetic oligonucleotide"
  source: /note="Description of Artificial Sequence: Synthetic oligonucleotide"
guguuacagucccguacaatt

SEQ ID NO: 33 - DNA, 21 bp, Artificial Sequence
  source: /note="Description of Combined DNA/RNA Molecule: Synthetic oligonucleotide"
  source: /note="Description of Artificial Sequence: Synthetic oligonucleotide"
gccugauuuugguacauggtt

SEQ ID NO: 34 - DNA, 21 bp, Artificial Sequence
  source: /note="Description of Combined DNA/RNA Molecule: Synthetic oligonucleotide"
  source: /note="Description of Artificial Sequence: Synthetic oligonucleotide"
ccauguaccaaaaucaggctt

SEQ ID NO: 35 - DNA, 21 bp, Artificial Sequence
  source: /note="Description of Combined DNA/RNA Molecule: Synthetic oligonucleotide"
  source: /note="Description of Artificial Sequence: Synthetic oligonucleotide"
gaaguaguaagggcguggatt

SEQ ID NO: 36 - DNA, 21 bp, Artificial Sequence
  source: /note="Description of Combined DNA/RNA Molecule: Synthetic oligonucleotide"
  source: /note="Description of Artificial Sequence: Synthetic oligonucleotide"
uccacgcccuuacuacuuctt

SEQ ID NO: 37 - DNA, 21 bp, Artificial Sequence
  source: /note="Description of Combined DNA/RNA Molecule: Synthetic oligonucleotide"
  source: /note="Description of Artificial Sequence: Synthetic oligonucleotide"
gaaguaguaagggcguggatt

SEQ ID NO: 38 - DNA, 21 bp, Artificial Sequence
  source: /note="Description of Combined DNA/RNA Molecule: Synthetic oligonucleotide"
  source: /note="Description of Artificial Sequence: Synthetic oligonucleotide"
uccacgcccuuacuacuuctt

SEQ ID NO: 39 - DNA, 21 bp, Artificial Sequence
  source: /note="Description of Combined DNA/RNA Molecule: Synthetic oligonucleotide"
  source: /note="Description of Artificial Sequence: Synthetic oligonucleotide"
gaaguaguaagggcguggatt

SEQ ID NO: 40 - DNA, 21 bp, Artificial Sequence
  source: /note="Description of Combined DNA/RNA Molecule: Synthetic oligonucleotide"
  source: /note="Description of Artificial Sequence: Synthetic oligonucleotide"
uccacgcccuuacuacuuctt

SEQ ID NO: 41 - DNA, 21 bp, Artificial Sequence
  source: /note="Description of Combined DNA/RNA Molecule: Synthetic oligonucleotide"
  source: /note="Description of Artificial Sequence: Synthetic oligonucleotide"
gaaguaguaagggcguggatt

SEQ ID NO: 42 - DNA, 21 bp, Artificial Sequence
  source: /note="Description of Combined DNA/RNA Molecule: Synthetic oligonucleotide"
  source: /note="Description of Artificial Sequence: Synthetic oligonucleotide"
uccacgcccuuacuacuuctt

SEQ ID NO: 43 - DNA, 21 bp, Artificial Sequence
  source: /note="Description of Combined DNA/RNA Molecule: Synthetic oligonucleotide"
  source: /note="Description of Artificial Sequence: Synthetic oligonucleotide"
auaggccuuacuccugaaatt

SEQ ID NO: 44 - DNA, 21 bp, Artificial Sequence
  source: /note="Description of Combined DNA/RNA Molecule: Synthetic oligonucleotide"
  source: /note="Description of Artificial Sequence: Synthetic oligonucleotide"
uuucaggaguaaggccuautt

SEQ ID NO: 45 - DNA, 21 bp, Artificial Sequence
  source: /note="Description of Combined DNA/RNA Molecule: Synthetic oligonucleotide"
  source: /note="Description of Artificial Sequence: Synthetic oligonucleotide"
auaggccuuacuccugaaatt

SEQ ID NO: 46 - DNA, 21 bp, Artificial Sequence
  source: /note="Description of Combined DNA/RNA Molecule: Synthetic oligonucleotide"
  source: /note="Description of Artificial Sequence: Synthetic oligonucleotide"
uuucaggaguaaggccuautt

SEQ ID NO: 47 - DNA, 21 bp, Artificial Sequence
  source: /note="Description of Combined DNA/RNA Molecule: Synthetic oligonucleotide"
  source: /note="Description of Artificial Sequence: Synthetic oligonucleotide"
gacagccauaugcaguagutt

SEQ ID NO: 48 - DNA, 21 bp, Artificial Sequence
  source: /note="Description of Combined DNA/RNA Molecule: Synthetic oligonucleotide"
  source: /note="Description of Artificial Sequence: Synthetic oligonucleotide"
acuacugcauauggcuguctt

SEQ ID NO: 49 - DNA, 21 bp, Artificial Sequence
  source: /note="Description of Combined DNA/RNA Molecule: Synthetic oligonucleotide"
  source: /note="Description of Artificial Sequence: Synthetic oligonucleotide"
gacagccauaugcaguagutt

SEQ ID NO: 50 - DNA, 21 bp, Artificial Sequence
  source: /note="Description of Combined DNA/RNA Molecule: Synthetic oligonucleotide"
  source: /note="Description of Artificial Sequence: Synthetic oligonucleotide"
acuacugcauauggcuguctt

SEQ ID NO: 51 - DNA, 21 bp, Artificial Sequence
  source: /note="Description of Combined DNA/RNA Molecule: Synthetic oligonucleotide"
  source: /note="Description of Artificial Sequence: Synthetic oligonucleotide"
gacagccauaugcaguagutt

SEQ ID NO: 52 - DNA, 21 bp, Artificial Sequence
  source: /note="Description of Combined DNA/RNA Molecule: Synthetic oligonucleotide"
  source: /note="Description of Artificial Sequence: Synthetic oligonucleotide"
acuacugcauauggcuguctt

SEQ ID NO: 53 - DNA, 21 bp, Artificial Sequence
  source: /note="Description of Combined DNA/RNA Molecule: Synthetic oligonucleotide"
  source: /note="Description of Artificial Sequence: Synthetic oligonucleotide"
gacagccauaugcaguagutt

SEQ ID NO: 54 - DNA, 21 bp, Artificial Sequence
  source: /note="Description of Combined DNA/RNA Molecule: Synthetic oligonucleotide"
  source: /note="Description of Artificial Sequence: Synthetic oligonucleotide"
acuacugcauauggcuguctt

SEQ ID NO: 55 - DNA, 21 bp, Artificial Sequence
  source: /note="Description of Combined DNA/RNA Molecule: Synthetic oligonucleotide"
  source: /note="Description of Artificial Sequence: Synthetic oligonucleotide"
aaacuacuugggcaauagutt

SEQ ID NO: 56 - DNA, 21 bp, Artificial Sequence
  source: /note="Description of Combined DNA/RNA Molecule: Synthetic oligonucleotide"
  source: /note="Description of Artificial Sequence: Synthetic oligonucleotide"
acuauugcccaaguaguuutt

SEQ ID NO: 57 - DNA, 21 bp, Artificial Sequence
  source: /note="Description of Combined DNA/RNA Molecule: Synthetic oligonucleotide"
  source: /note="Description of Artificial Sequence: Synthetic oligonucleotide"
aaacuacuugggcaauagutt

SEQ ID NO: 58 - DNA, 21 bp, Artificial Sequence
  source: /note="Description of Combined DNA/RNA Molecule: Synthetic oligonucleotide"
  source: /note="Description of Artificial Sequence: Synthetic oligonucleotide"
acuauugcccaaguaguuutt

SEQ ID NO: 59 - DNA, 21 bp, Artificial Sequence
  source: /note="Description of Combined DNA/RNA Molecule: Synthetic oligonucleotide"
  source: /note="Description of Artificial Sequence: Synthetic oligonucleotide"
aaacuacuugggcaauagutt

SEQ ID NO: 60 - DNA, 21 bp, Artificial Sequence
  source: /note="Description of Combined DNA/RNA Molecule: Synthetic oligonucleotide"
  source: /note="Description of Artificial Sequence: Synthetic oligonucleotide"
acuauugcccaaguaguuutt

SEQ ID NO: 61 - DNA, 21 bp, Artificial Sequence
  source: /note="Description of Combined DNA/RNA Molecule: Synthetic oligonucleotide"
  source: /note="Description of Artificial Sequence: Synthetic oligonucleotide"
aaacuacuugggcaauagutt

SEQ ID NO: 62 - DNA, 21 bp, Artificial Sequence
  source: /note="Description of Combined DNA/RNA Molecule: Synthetic oligonucleotide"
  source: /note="Description of Artificial Sequence: Synthetic oligonucleotide"
acuauugcccaaguaguuutt

SEQ ID NO: 63 - DNA, 21 bp, Artificial Sequence
  source: /note="Description of Combined DNA/RNA Molecule: Synthetic oligonucleotide"
  source: /note="Description of Artificial Sequence: Synthetic oligonucleotide"
ucagguucaugggugccgctt

SEQ ID NO: 64 - DNA, 21 bp, Artificial Sequence
  source: /note="Description of Combined DNA/RNA Molecule: Synthetic oligonucleotide"
  source: /note="Description of Artificial Sequence: Synthetic oligonucleotide"
gcggcacccaugaaccugatt

SEQ ID NO: 65 - DNA, 21 bp, Artificial Sequence
  source: /note="Description of Combined DNA/RNA Molecule: Synthetic oligonucleotide"
  source: /note="Description of Artificial Sequence: Synthetic oligonucleotide"
ucagguucaugggugccgctt

SEQ ID NO: 66 - DNA, 21 bp, Artificial Sequence
  source: /note="Description of Combined DNA/RNA Molecule: Synthetic oligonucleotide"
  source: /note="Description of Artificial Sequence: Synthetic oligonucleotide"
gcggcacccaugaaccugatt

SEQ ID NO: 67 - DNA, 21 bp, Artificial Sequence
  source: /note="Description of Combined DNA/RNA Molecule: Synthetic oligonucleotide"
  source: /note="Description of Artificial Sequence: Synthetic oligonucleotide"
guaguaagggcguggaggctt

SEQ ID NO: 68 - DNA, 21 bp, Artificial Sequence
  source: /note="Description of Combined DNA/RNA Molecule: Synthetic oligonucleotide"
  source: /note="Description of Artificial Sequence: Synthetic oligonucleotide"
gccuccacgcccuuacuactt

SEQ ID NO: 69 - DNA, 21 bp, Artificial Sequence
  source: /note="Description of Combined DNA/RNA Molecule: Synthetic oligonucleotide"
  source: /note="Description of Artificial Sequence: Synthetic oligonucleotide"
guaguaagggcguggaggctt

SEQ ID NO: 70 - DNA, 21 bp, Artificial Sequence
  source: /note="Description of Combined DNA/RNA Molecule: Synthetic oligonucleotide"
  source: /note="Description of Artificial Sequence: Synthetic oligonucleotide"
gccuccacgcccuuacuactt

SEQ ID NO: 71 - DNA, 21 bp, Artificial Sequence
  source: /note="Description of Combined DNA/RNA Molecule: Synthetic oligonucleotide"
  source: /note="Description of Artificial Sequence: Synthetic oligonucleotide"
uauugcaaggaauggccuatt

SEQ ID NO: 72 - DNA, 21 bp, Artificial Sequence
  source: /note="Description of Combined DNA/RNA Molecule: Synthetic oligonucleotide"
  source: /note="Description of Artificial Sequence: Synthetic oligonucleotide"
uaggccauuccuugcaauatt

SEQ ID NO: 73 - DNA, 21 bp, Artificial Sequence
  source: /note="Description of Combined DNA/RNA Molecule: Synthetic oligonucleotide"
  source: /note="Description of Artificial Sequence: Synthetic oligonucleotide"
uauugcaaggaauggccuatt

SEQ ID NO: 74 - DNA, 21 bp, Artificial Sequence
  source: /note="Description of Combined DNA/RNA Molecule: Synthetic oligonucleotide"
  source: /note="Description of Artificial Sequence: Synthetic oligonucleotide"
uaggccauuccuugcaauatt

SEQ ID NO: 75 - DNA, 21 bp, Artificial Sequence
  source: /note="Description of Combined DNA/RNA Molecule: Synthetic oligonucleotide"
  source: /note="Description of Artificial Sequence: Synthetic oligonucleotide"
uauugcaaggaauggccuatt

SEQ ID NO: 76 - DNA, 21 bp, Artificial Sequence
  source: /note="Description of Combined DNA/RNA Molecule: Synthetic oligonucleotide"
  source: /note="Description of Artificial Sequence: Synthetic oligonucleotide"
uaggccauuccuugcaauatt

SEQ ID NO: 77 - DNA, 21 bp, Artificial Sequence
  source: /note="Description of Combined DNA/RNA Molecule: Synthetic oligonucleotide"
  source: /note="Description of Artificial Sequence: Synthetic oligonucleotide"
uauugcaaggaauggccuatt

SEQ ID NO: 78 - DNA, 21 bp, Artificial Sequence
  source: /note="Description of Combined DNA/RNA Molecule: Synthetic oligonucleotide"
  source: /note="Description of Artificial Sequence: Synthetic oligonucleotide"
uaggccauuccuugcaauatt

SEQ ID NO: 79 - DNA, 21 bp, Artificial Sequence
  source: /note="Description of Combined DNA/RNA Molecule: Synthetic oligonucleotide"
  source: /note="Description of Artificial Sequence: Synthetic oligonucleotide"
aguaguaagggcguggaggtt

SEQ ID NO: 80 - DNA, 21 bp, Artificial Sequence
  source: /note="Description of Combined DNA/RNA Molecule: Synthetic oligonucleotide"
  source: /note="Description of Artificial Sequence: Synthetic oligonucleotide"
ccuccacgcccuuacuacutt

SEQ ID NO: 81 - DNA, 21 bp, Artificial Sequence
  source: /note="Description of Combined DNA/RNA Molecule: Synthetic oligonucleotide"
  source: /note="Description of Artificial Sequence: Synthetic oligonucleotide"
aguaguaagggcguggaggtt

SEQ ID NO: 82 - DNA, 21 bp, Artificial Sequence
  source: /note="Description of Combined DNA/RNA Molecule: Synthetic oligonucleotide"
  source: /note="Description of Artificial Sequence: Synthetic oligonucleotide"
ccuccacgcccuuacuacutt

SEQ ID NO: 83 - DNA, 21 bp, Artificial Sequence
  source: /note="Description of Combined DNA/RNA Molecule: Synthetic oligonucleotide"
  source: /note="Description of Artificial Sequence: Synthetic oligonucleotide"
aguaguaagggcguggaggtt

SEQ ID NO: 84 - DNA, 21 bp, Artificial Sequence
  source: /note="Description of Combined DNA/RNA Molecule: Synthetic oligonucleotide"
  source: /note="Description of Artificial Sequence: Synthetic oligonucleotide"
ccuccacgcccuuacuacutt

SEQ ID NO: 85 - DNA, 21 bp, Artificial Sequence
  source: /note="Description of Combined DNA/RNA Molecule: Synthetic oligonucleotide"
  source: /note="Description of Artificial Sequence: Synthetic oligonucleotide"
aguaguaagggcguggaggtt

SEQ ID NO: 86 - DNA, 21 bp, Artificial Sequence
  source: /note="Description of Combined DNA/RNA Molecule: Synthetic oligonucleotide"
  source: /note="Description of Artificial Sequence: Synthetic oligonucleotide"
ccuccacgcccuuacuacutt

SEQ ID NO: 87 - DNA, 21 bp, Artificial Sequence
  source: /note="Description of Combined DNA/RNA Molecule: Synthetic oligonucleotide"
  source: /note="Description of Artificial Sequence: Synthetic oligonucleotide"
ugcuauugcuuugauugcutt

SEQ ID NO: 88 - DNA, 21 bp, Artificial Sequence
  source: /note="Description of Combined DNA/RNA Molecule: Synthetic oligonucleotide"
  source: /note="Description of Artificial Sequence: Synthetic oligonucleotide"
agcaaucaaagcaauagcatt

SEQ ID NO: 89 - DNA, 21 bp, Artificial Sequence
  source: /note="Description of Combined DNA/RNA Molecule: Synthetic oligonucleotide"
  source: /note="Description of Artificial Sequence: Synthetic oligonucleotide"
ugcuauugcuuugauugcutt

SEQ ID NO: 90 - DNA, 21 bp, Artificial Sequence
  source: /note="Description of Combined DNA/RNA Molecule: Synthetic oligonucleotide"
  source: /note="Description of Artificial Sequence: Synthetic oligonucleotide"
agcaaucaaagcaauagcatt

SEQ ID NO: 91 - DNA, 21 bp, Artificial Sequence
  source: /note="Description of Combined DNA/RNA Molecule: Synthetic oligonucleotide"
  source: /note="Description of Artificial Sequence: Synthetic oligonucleotide"
ugcuauugcuuugauugcutt

SEQ ID NO: 92 - DNA, 21 bp, Artificial Sequence
  source: /note="Description of Combined DNA/RNA Molecule: Synthetic oligonucleotide"
  source: /note="Description of Artificial Sequence: Synthetic oligonucleotide"
agcaaucaaagcaauagcatt

SEQ ID NO: 93 - DNA, 21 bp, Artificial Sequence
  source: /note="Description of Combined DNA/RNA Molecule: Synthetic oligonucleotide"
  source: /note="Description of Artificial Sequence: Synthetic oligonucleotide"
ugcuauugcuuugauugcutt

SEQ ID NO: 94 - DNA, 21 bp, Artificial Sequence
  source: /note="Description of Combined DNA/RNA Molecule: Synthetic oligonucleotide"
  source: /note="Description of Artificial Sequence: Synthetic oligonucleotide"
agcaaucaaagcaauagcatt

SEQ ID NO: 95 - DNA, 21 bp, Artificial Sequence
  source: /note="Description of Combined DNA/RNA Molecule: Synthetic oligonucleotide"
  source: /note="Description of Artificial Sequence: Synthetic oligonucleotide"
gcuauugcuuugauugcuutt

SEQ ID NO: 96 - DNA, 21 bp, Artificial Sequence
  source: /note="Description of Combined DNA/RNA Molecule: Synthetic oligonucleotide"
  source: /note="Description of Artificial Sequence: Synthetic oligonucleotide"
aagcaaucaaagcaauagctt

SEQ ID NO: 97 - DNA, 21 bp, Artificial Sequence
  source: /note="Description of Combined DNA/RNA Molecule: Synthetic oligonucleotide"
  source: /note="Description of Artificial Sequence: Synthetic oligonucleotide"
gcuauugcuuugauugcuutt

SEQ ID NO: 98 - DNA, 21 bp, Artificial Sequence
  source: /note="Description of Combined DNA/RNA Molecule: Synthetic oligonucleotide"
  source: /note="Description of Artificial Sequence: Synthetic oligonucleotide"
aagcaaucaaagcaauagctt

SEQ ID NO: 99 - DNA, 21 bp, Artificial Sequence
  source: /note="Description of Combined DNA/RNA Molecule: Synthetic oligonucleotide"
  source: /note="Description of Artificial Sequence: Synthetic oligonucleotide"
ccuuuacuuuuaggguugutt

SEQ ID NO: 100 - DNA, 21 bp, Artificial Sequence
  source: /note="Description of Combined DNA/RNA Molecule: Synthetic oligonucleotide"
  source: /note="Description of Artificial Sequence: Synthetic oligonucleotide"
acaacccuaaaaguaaaggtt

SEQ ID NO: 101 - DNA, 21 bp, Artificial Sequence
  source: /note="Description of Combined DNA/RNA Molecule: Synthetic oligonucleotide"
  source: /note="Description of Artificial Sequence: Synthetic oligonucleotide"
uuacuuuuaggguuguacgtt

SEQ ID NO: 102 - DNA, 21 bp, Artificial Sequence
  source: /note="Description of Combined DNA/RNA Molecule: Synthetic oligonucleotide"
  source: /note="Description of Artificial Sequence: Synthetic oligonucleotide"
cguacaacccuaaaaguaatt

SEQ ID NO: 103 - DNA, 21 bp, Artificial Sequence
  source: /note="Description of Combined DNA/RNA Molecule: Synthetic oligonucleotide"
  source: /note="Description of Artificial Sequence: Synthetic oligonucleotide"
uuacuuuuaggguuguacgtt

SEQ ID NO: 104 - DNA, 21 bp, Artificial Sequence
  source: /note="Description of Combined DNA/RNA Molecule: Synthetic oligonucleotide"
  source: /note="Description of Artificial Sequence: Synthetic oligonucleotide"
cguacaacccuaaaaguaatt

SEQ ID NO: 105 - DNA, 21 bp, Artificial Sequence
  source: /note="Description of Combined DNA/RNA Molecule: Synthetic oligonucleotide"
  source: /note="Description of Artificial Sequence: Synthetic oligonucleotide"
gcuccucaauggauguugctt

SEQ ID NO: 106 - DNA, 21 bp, Artificial Sequence
  source: /note="Description of Combined DNA/RNA Molecule: Synthetic oligonucleotide"
  source: /note="Description of Artificial Sequence: Synthetic oligonucleotide"
gcaacauccauugaggagctt

SEQ ID NO: 107 - DNA, 21 bp, Artificial Sequence
  source: /note="Description of Combined DNA/RNA Molecule: Synthetic oligonucleotide"
  source: /note="Description of Artificial Sequence: Synthetic oligonucleotide"
uuauaagaggaggaguagatt

SEQ ID NO: 108 - DNA, 21 bp, Artificial Sequence
  source: /note="Description of Combined DNA/RNA Molecule: Synthetic oligonucleotide"
  source: /note="Description of Artificial Sequence: Synthetic oligonucleotide"
ucuacuccuccucuuauaatt

SEQ ID NO: 109 - DNA, 21 bp, Artificial Sequence
  source: /note="Description of Combined DNA/RNA Molecule: Synthetic oligonucleotide"
  source: /note="Description of Artificial Sequence: Synthetic oligonucleotide"
uuauaagaggaggaguagatt

SEQ ID NO: 110 - DNA, 21 bp, Artificial Sequence
  source: /note="Description of Combined DNA/RNA Molecule: Synthetic oligonucleotide"
  source: /note="Description of Artificial Sequence: Synthetic oligonucleotide"
ucuacuccuccucuuauaatt

SEQ ID NO: 111 - DNA, 21 bp, Artificial Sequence
  source: /note="Description of Combined DNA/RNA Molecule: Synthetic oligonucleotide"
  source: /note="Description of Artificial Sequence: Synthetic oligonucleotide"
aaguaguaagggcguggagtt

SEQ ID NO: 112 - DNA, 21 bp, Artificial Sequence
  source: /note="Description of Combined DNA/RNA Molecule: Synthetic oligonucleotide"
  source: /note="Description of Artificial Sequence: Synthetic oligonucleotide"
cuccacgcccuuacuacuutt

SEQ ID NO: 113 - DNA, 21 bp, Artificial Sequence
  source: /note="Description of Combined DNA/RNA Molecule: Synthetic oligonucleotide"
  source: /note="Description of Artificial Sequence: Synthetic oligonucleotide"
aaguaguaagggcguggagtt

SEQ ID NO: 114 - DNA, 21 bp, Artificial Sequence
  source: /note="Description of Combined DNA/RNA Molecule: Synthetic oligonucleotide"
  source: /note="Description of Artificial Sequence: Synthetic oligonucleotide"
cuccacgcccuuacuacuutt

SEQ ID NO: 115 - DNA, 21 bp, Artificial Sequence
  source: /note="Description of Combined DNA/RNA Molecule: Synthetic oligonucleotide"
  source: /note="Description of Artificial Sequence: Synthetic oligonucleotide"
aaguaguaagggcguggagtt

SEQ ID NO: 116 - DNA, 21 bp, Artificial Sequence
  source: /note="Description of Combined DNA/RNA Molecule: Synthetic oligonucleotide"
  source: /note="Description of Artificial Sequence: Synthetic oligonucleotide"
cuccacgcccuuacuacuutt

SEQ ID NO: 117 - DNA, 21 bp, Artificial Sequence
  source: /note="Description of Combined DNA/RNA Molecule: Synthetic oligonucleotide"
  source: /note="Description of Artificial Sequence: Synthetic oligonucleotide"
aaguaguaagggcguggagtt

SEQ ID NO: 118 - DNA, 21 bp, Artificial Sequence
  source: /note="Description of Combined DNA/RNA Molecule: Synthetic oligonucleotide"
  source: /note="Description of Artificial Sequence: Synthetic oligonucleotide"
cuccacgcccuuacuacuutt

SEQ ID NO: 119 - DNA, 21 bp, Artificial Sequence
  source: /note="Description of Combined DNA/RNA Molecule: Synthetic oligonucleotide"
  source: /note="Description of Artificial Sequence: Synthetic oligonucleotide"
uuaggguuguacgggacugtt

SEQ ID NO: 120 - DNA, 21 bp, Artificial Sequence
  source: /note="Description of Combined DNA/RNA Molecule: Synthetic oligonucleotide"
  source: /note="Description of Artificial Sequence: Synthetic oligonucleotide"
cagucccguacaacccuaatt

SEQ ID NO: 121 - DNA, 21 bp, Artificial Sequence
  source: /note="Description of Combined DNA/RNA Molecule: Synthetic oligonucleotide"
  source: /note="Description of Artificial Sequence: Synthetic oligonucleotide"
uuaggguuguacgggacugtt

SEQ ID NO: 122 - DNA, 21 bp, Artificial Sequence
  source: /note="Description of Combined DNA/RNA Molecule: Synthetic oligonucleotide"
  source: /note="Description of Artificial Sequence: Synthetic oligonucleotide"
cagucccguacaacccuaatt

SEQ ID NO: 123 - DNA, 21 bp, Artificial Sequence
  source: /note="Description of Combined DNA/RNA Molecule: Synthetic oligonucleotide"
  source: /note="Description of Artificial Sequence: Synthetic oligonucleotide"
gacaugcuuccuuguuacatt

SEQ ID NO: 124 - DNA, 21 bp, Artificial Sequence
  source: /note="Description of Combined DNA/RNA Molecule: Synthetic oligonucleotide"
  source: /note="Description of Artificial Sequence: Synthetic oligonucleotide"
uguaacaaggaagcauguctt

SEQ ID NO: 125 - DNA, 21 bp, Artificial Sequence
  source: /note="Description of Combined DNA/RNA Molecule: Synthetic oligonucleotide"
  source: /note="Description of Artificial Sequence: Synthetic oligonucleotide"
gacaugcuuccuuguuacatt

SEQ ID NO: 126 - DNA, 21 bp, Artificial Sequence
  source: /note="Description of Combined DNA/RNA Molecule: Synthetic oligonucleotide"
  source: /note="Description of Artificial Sequence: Synthetic oligonucleotide"
uguaacaaggaagcauguctt

SEQ ID NO: 127 - DNA, 21 bp, Artificial Sequence
  source: /note="Description of Combined DNA/RNA Molecule: Synthetic oligonucleotide"
  source: /note="Description of Artificial Sequence: Synthetic oligonucleotide"
gacaugcuuccuuguuacatt

SEQ ID NO: 128 - DNA, 21 bp, Artificial Sequence
  source: /note="Description of Combined DNA/RNA Molecule: Synthetic oligonucleotide"
  source: /note="Description of Artificial Sequence: Synthetic oligonucleotide"
uguaacaaggaagcauguctt

SEQ ID NO: 129 - DNA, 21 bp, Artificial Sequence
  source: /note="Description of Combined DNA/RNA Molecule: Synthetic oligonucleotide"
  source: /note="Description of Artificial Sequence: Synthetic oligonucleotide"
gacaugcuuccuuguuacatt

SEQ ID NO: 130 - DNA, 21 bp, Artificial Sequence
  source: /note="Description of Combined DNA/RNA Molecule: Synthetic oligonucleotide"
  source: /note="Description of Artificial Sequence: Synthetic oligonucleotide"
uguaacaaggaagcauguctt

SEQ ID NO: 131 - DNA, 21 bp, Artificial Sequence
  source: /note="Description of Combined DNA/RNA Molecule: Synthetic oligonucleotide"
  source: /note="Description of Artificial Sequence: Synthetic oligonucleotide"
uguugaauguuggguuccutt

SEQ ID NO: 132 - DNA, 21 bp, Artificial Sequence
  source: /note="Description of Combined DNA/RNA Molecule: Synthetic oligonucleotide"
  source: /note="Description of Artificial Sequence: Synthetic oligonucleotide"
aggaacccaacauucaacatt

SEQ ID NO: 133 - DNA, 21 bp, Artificial Sequence
  source: /note="Description of Combined DNA/RNA Molecule: Synthetic oligonucleotide"
  source: /note="Description of Artificial Sequence: Synthetic oligonucleotide"
uguugaauguuggguuccutt

SEQ ID NO: 134 - DNA, 21 bp, Artificial Sequence
  source: /note="Description of Combined DNA/RNA Molecule: Synthetic oligonucleotide"
  source: /note="Description of Artificial Sequence: Synthetic oligonucleotide"
aggaacccaacauucaacatt

SEQ ID NO: 135 - DNA, 21 bp, Artificial Sequence
  source: /note="Description of Combined DNA/RNA Molecule: Synthetic oligonucleotide"
  source: /note="Description of Artificial Sequence: Synthetic oligonucleotide"
uguugaauguuggguuccutt

SEQ ID NO: 136 - DNA, 21 bp, Artificial Sequence
  source: /note="Description of Combined DNA/RNA Molecule: Synthetic oligonucleotide"
  source: /note="Description of Artificial Sequence: Synthetic oligonucleotide"
aggaacccaacauucaacatt

SEQ ID NO: 137 - DNA, 21 bp, Artificial Sequence
  source: /note="Description of Combined DNA/RNA Molecule: Synthetic oligonucleotide"
  source: /note="Description of Artificial Sequence: Synthetic oligonucleotide"
uguugaauguuggguuccutt

SEQ ID NO: 138 - DNA, 21 bp, Artificial Sequence
  source: /note="Description of Combined DNA/RNA Molecule: Synthetic oligonucleotide"
  source: /note="Description of Artificial Sequence: Synthetic oligonucleotide"
aggaacccaacauucaacatt

SEQ ID NO: 139 - DNA, 21 bp, Artificial Sequence
  source: /note="Description of Combined DNA/RNA Molecule: Synthetic oligonucleotide"
  source: /note="Description of Artificial Sequence: Synthetic oligonucleotide"
acuuaacccaagaagcucutt

SEQ ID NO: 140 - DNA, 21 bp, Artificial Sequence
  source: /note="Description of Combined DNA/RNA Molecule: Synthetic oligonucleotide"
  source: /note="Description of Artificial Sequence: Synthetic oligonucleotide"
agagcuucuuggguuaagutt

SEQ ID NO: 141 - DNA, 21 bp, Artificial Sequence
  source: /note="Description of Combined DNA/RNA Molecule: Synthetic oligonucleotide"
  source: /note="Description of Artificial Sequence: Synthetic oligonucleotide"
acuuaacccaagaagcucutt

SEQ ID NO: 142 - DNA, 21 bp, Artificial Sequence
  source: /note="Description of Combined DNA/RNA Molecule: Synthetic oligonucleotide"
  source: /note="Description of Artificial Sequence: Synthetic oligonucleotide"
agagcuucuuggguuaagutt

SEQ ID NO: 143 - DNA, 21 bp, Artificial Sequence
  source: /note="Description of Combined DNA/RNA Molecule: Synthetic oligonucleotide"
  source: /note="Description of Artificial Sequence: Synthetic oligonucleotide"
ucagccugauuuugguacatt

SEQ ID NO: 144 - DNA, 21 bp, Artificial Sequence
  source: /note="Description of Combined DNA/RNA Molecule: Synthetic oligonucleotide"
  source: /note="Description of Artificial Sequence: Synthetic oligonucleotide"
uguaccaaaaucaggcugatt

SEQ ID NO: 145 - DNA, 21 bp, Artificial Sequence
  source: /note="Description of Combined DNA/RNA Molecule: Synthetic oligonucleotide"
  source: /note="Description of Artificial Sequence: Synthetic oligonucleotide"
ucagccugauuuugguacatt

SEQ ID NO: 146 - DNA, 21 bp, Artificial Sequence
  source: /note="Description of Combined DNA/RNA Molecule: Synthetic oligonucleotide"
  source: /note="Description of Artificial Sequence: Synthetic oligonucleotide"
uguaccaaaaucaggcugatt

SEQ ID NO: 147 - DNA, 21 bp, Artificial Sequence
  source: /note="Description of Combined DNA/RNA Molecule: Synthetic oligonucleotide"
  source: /note="Description of Artificial Sequence: Synthetic oligonucleotide"
uuuuaggguuguacgggactt

SEQ ID NO: 148 - DNA, 21 bp, Artificial Sequence
  source: /note="Description of Combined DNA/RNA Molecule: Synthetic oligonucleotide"
  source: /note="Description of Artificial Sequence: Synthetic oligonucleotide"
gucccguacaacccuaaaatt

SEQ ID NO: 149 - DNA, 21 bp, Artificial Sequence
  source: /note="Description of Combined DNA/RNA Molecule: Synthetic oligonucleotide"
  source: /note="Description of Artificial Sequence: Synthetic oligonucleotide"
uuuuaggguuguacgggactt

SEQ ID NO: 150 - DNA, 21 bp, Artificial Sequence
  source: /note="Description of Combined DNA/RNA Molecule: Synthetic oligonucleotide"
  source: /note="Description of Artificial Sequence: Synthetic oligonucleotide"
gucccguacaacccuaaaatt

SEQ ID NO: 151 - DNA, 21 bp, Artificial Sequence
  source: /note="Description of Combined DNA/RNA Molecule: Synthetic oligonucleotide"
  source: /note="Description of Artificial Sequence: Synthetic oligonucleotide"
uuuaggguuguacgggacutt

SEQ ID NO: 152 - DNA, 21 bp, Artificial Sequence
  source: /note="Description of Combined DNA/RNA Molecule: Synthetic oligonucleotide"
  source: /note="Description of Artificial Sequence: Synthetic oligonucleotide"
agucccguacaacccuaaatt

SEQ ID NO: 153 - DNA, 21 bp, Artificial Sequence
  source: /note="Description of Combined DNA/RNA Molecule: Synthetic oligonucleotide"
  source: /note="Description of Artificial Sequence: Synthetic oligonucleotide"
uuuaggguuguacgggacutt

SEQ ID NO: 154 - DNA, 21 bp, Artificial Sequence
  source: /note="Description of Combined DNA/RNA Molecule: Synthetic oligonucleotide"
  source: /note="Description of Artificial Sequence: Synthetic oligonucleotide"
agucccguacaacccuaaatt

SEQ ID NO: 155 - DNA, 21 bp, Artificial Sequence
  source: /note="Description of Combined DNA/RNA Molecule: Synthetic oligonucleotide"
  source: /note="Description of Artificial Sequence: Synthetic oligonucleotide"
ucccuugcuacuguagaggtt

SEQ ID NO: 156 - DNA, 21 bp, Artificial Sequence
  source: /note="Description of Combined DNA/RNA Molecule: Synthetic oligonucleotide"
  source: /note="Description of Artificial Sequence: Synthetic oligonucleotide"
ccucuacaguagcaagggatt

SEQ ID NO: 157 - DNA, 21 bp, Artificial Sequence
  source: /note="Description of Combined DNA/RNA Molecule: Synthetic oligonucleotide"
  source: /note="Description of Artificial Sequence: Synthetic oligonucleotide"
ucccuugcuacuguagaggtt

SEQ ID NO: 158 - DNA, 21 bp, Artificial Sequence
  source: /note="Description of Combined DNA/RNA Molecule: Synthetic oligonucleotide"
  source: /note="Description of Artificial Sequence: Synthetic oligonucleotide"
ccucuacaguagcaagggatt

SEQ ID NO: 159 - DNA, 21 bp, Artificial Sequence
  source: /note="Description of Combined DNA/RNA Molecule: Synthetic oligonucleotide"
  source: /note="Description of Artificial Sequence: Synthetic oligonucleotide"
cccuugcuacuguagagggtt

SEQ ID NO: 160 - DNA, 21 bp, Artificial Sequence
  source: /note="Description of Combined DNA/RNA Molecule: Synthetic oligonucleotide"
  source: /note="Description of Artificial Sequence: Synthetic oligonucleotide"
cccucuacaguagcaagggtt

SEQ ID NO: 161 - DNA, 21 bp, Artificial Sequence
  source: /note="Description of Combined DNA/RNA Molecule: Synthetic oligonucleotide"
  source: /note="Description of Artificial Sequence: Synthetic oligonucleotide"
cccuugcuacuguagagggtt

SEQ ID NO: 162 - DNA, 21 bp, Artificial Sequence
  source: /note="Description of Combined DNA/RNA Molecule: Synthetic oligonucleotide"
  source: /note="Description of Artificial Sequence: Synthetic oligonucleotide"
cccucuacaguagcaagggtt

SEQ ID NO: 163 - DNA, 21 bp, Artificial Sequence
  source: /note="Description of Combined DNA/RNA Molecule: Synthetic oligonucleotide"
  source: /note="Description of Artificial Sequence: Synthetic oligonucleotide"
ugcuccucaauggauguugtt

SEQ ID NO: 164 - DNA, 21 bp, Artificial Sequence
  source: /note="Description of Combined DNA/RNA Molecule: Synthetic oligonucleotide"
  source: /note="Description of Artificial Sequence: Synthetic oligonucleotide"
caacauccauugaggagcatt

SEQ ID NO: 165 - DNA, 21 bp, Artificial Sequence
  source: /note="Description of Combined DNA/RNA Molecule: Synthetic oligonucleotide"
  source: /note="Description of Artificial Sequence: Synthetic oligonucleotide"
ugcuccucaauggauguugtt

SEQ ID NO: 166 - DNA, 21 bp, Artificial Sequence
  source: /note="Description of Combined DNA/RNA Molecule: Synthetic oligonucleotide"
  source: /note="Description of Artificial Sequence: Synthetic oligonucleotide"
caacauccauugaggagcatt

SEQ ID NO: 167 - DNA, 21 bp, Artificial Sequence
  source: /note="Description of Combined DNA/RNA Molecule: Synthetic oligonucleotide"
  source: /note="Description of Artificial Sequence: Synthetic oligonucleotide"
ugcuccucaauggauguugtt

SEQ ID NO: 168 - DNA, 21 bp, Artificial Sequence
  source: /note="Description of Combined DNA/RNA Molecule: Synthetic oligonucleotide"
  source: /note="Description of Artificial Sequence: Synthetic oligonucleotide"
caacauccauugaggagcatt

SEQ ID NO: 169 - DNA, 21 bp, Artificial Sequence
  source: /note="Description of Combined DNA/RNA Molecule: Synthetic oligonucleotide"
  source: /note="Description of Artificial Sequence: Synthetic oligonucleotide"
ugcuccucaauggauguugtt

SEQ ID NO: 170 - DNA, 21 bp, Artificial Sequence
  source: /note="Description of Combined DNA/RNA Molecule: Synthetic oligonucleotide"
  source: /note="Description of Artificial Sequence: Synthetic oligonucleotide"
caacauccauugaggagcatt

SEQ ID NO: 171 - DNA, 21 bp, Artificial Sequence
  source: /note="Description of Combined DNA/RNA Molecule: Synthetic oligonucleotide"
  source: /note="Description of Artificial Sequence: Synthetic oligonucleotide"
gaucugcuccucaauggautt

SEQ ID NO: 172 - DNA, 21 bp, Artificial Sequence
  source: /note="Description of Combined DNA/RNA Molecule: Synthetic oligonucleotide"
  source: /note="Description of Artificial Sequence: Synthetic oligonucleotide"
auccauugaggagcagauctt

SEQ ID NO: 173 - DNA, 21 bp, Artificial Sequence
  source: /note="Description of Combined DNA/RNA Molecule: Synthetic oligonucleotide"
  source: /note="Description of Artificial Sequence: Synthetic oligonucleotide"
gaucugcuccucaauggautt

SEQ ID NO: 174 - DNA, 21 bp, Artificial Sequence
  source: /note="Description of Combined DNA/RNA Molecule: Synthetic oligonucleotide"
  source: /note="Description of Artificial Sequence: Synthetic oligonucleotide"
auccauugaggagcagauctt

SEQ ID NO: 175 - DNA, 21 bp, Artificial Sequence
  source: /note="Description of Combined DNA/RNA Molecule: Synthetic oligonucleotide"
  source: /note="Description of Artificial Sequence: Synthetic oligonucleotide"
gaucugcuccucaauggautt

SEQ ID NO: 176 - DNA, 21 bp, Artificial Sequence
  source: /note="Description of Combined DNA/RNA Molecule: Synthetic oligonucleotide"
  source: /note="Description of Artificial Sequence: Synthetic oligonucleotide"
auccauugaggagcagauctt

SEQ ID NO: 177 - DNA, 21 bp, Artificial Sequence
  source: /note="Description of Combined DNA/RNA Molecule: Synthetic oligonucleotide"
  source: /note="Description of Artificial Sequence: Synthetic oligonucleotide"
gaucugcuccucaauggautt

SEQ ID NO: 178 - DNA, 21 bp, Artificial Sequence
  source: /note="Description of Combined DNA/RNA Molecule: Synthetic oligonucleotide"
  source: /note="Description of Artificial Sequence: Synthetic oligonucleotide"
auccauugaggagcagauctt

SEQ ID NO: 179 - DNA, 21 bp, Artificial Sequence
  source: /note="Description of Combined DNA/RNA Molecule: Synthetic oligonucleotide"
  source: /note="Description of Artificial Sequence: Synthetic oligonucleotide"
aucugcuccucaauggaugtt

SEQ ID NO: 180 - DNA, 21 bp, Artificial Sequence
  source: /note="Description of Combined DNA/RNA Molecule: Synthetic oligonucleotide"
  source: /note="Description of Artificial Sequence: Synthetic oligonucleotide"
cauccauugaggagcagautt

SEQ ID NO: 181 - DNA, 21 bp, Artificial Sequence
  source: /note="Description of Combined DNA/RNA Molecule: Synthetic oligonucleotide"
  source: /note="Description of Artificial Sequence: Synthetic oligonucleotide"
aucugcuccucaauggaugtt

SEQ ID NO: 182 - DNA, 21 bp, Artificial Sequence
  source: /note="Description of Combined DNA/RNA Molecule: Synthetic oligonucleotide"
  source: /note="Description of Artificial Sequence: Synthetic oligonucleotide"
cauccauugaggagcagautt

SEQ ID NO: 183 - DNA, 21 bp, Artificial Sequence
  source: /note="Description of Combined DNA/RNA Molecule: Synthetic oligonucleotide"
  source: /note="Description of Artificial Sequence: Synthetic oligonucleotide"
ucugcuccucaauggaugutt

SEQ ID NO: 184 - DNA, 21 bp, Artificial Sequence
  source: /note="Description of Combined DNA/RNA Molecule: Synthetic oligonucleotide"
  source: /note="Description of Artificial Sequence: Synthetic oligonucleotide"
acauccauugaggagcagatt

SEQ ID NO: 185 - DNA, 21 bp, Artificial Sequence
  source: /note="Description of Combined DNA/RNA Molecule: Synthetic oligonucleotide"
  source: /note="Description of Artificial Sequence: Synthetic oligonucleotide"
cugcuccucaauggauguutt

SEQ ID NO: 186 - DNA, 21 bp, Artificial Sequence
  source: /note="Description of Combined DNA/RNA Molecule: Synthetic oligonucleotide"
  source: /note="Description of Artificial Sequence: Synthetic oligonucleotide"
aacauccauugaggagcagtt

SEQ ID NO: 187 - DNA, 21 bp, Artificial Sequence
  source: /note="Description of Combined DNA/RNA Molecule: Synthetic oligonucleotide"
  source: /note="Description of Artificial Sequence: Synthetic oligonucleotide"
cugcuccucaauggauguutt

SEQ ID NO: 188 - DNA, 21 bp, Artificial Sequence
  source: /note="Description of Combined DNA/RNA Molecule: Synthetic oligonucleotide"
  source: /note="Description of Artificial Sequence: Synthetic oligonucleotide"
aacauccauugaggagcagtt

SEQ ID NO: 189 - DNA, 21 bp, Artificial Sequence
  source: /note="Description of Combined DNA/RNA Molecule: Synthetic oligonucleotide"
  source: /note="Description of Artificial Sequence: Synthetic oligonucleotide"
guuguacgggacuguaacatt

SEQ ID NO: 190 - DNA, 21 bp, Artificial Sequence
  source: /note="Description of Combined DNA/RNA Molecule: Synthetic oligonucleotide"
  source: /note="Description of Artificial Sequence: Synthetic oligonucleotide"
uguuacagucccguacaactt

SEQ ID NO: 191 - DNA, 21 bp, Artificial Sequence
  source: /note="Description of Combined DNA/RNA Molecule: Synthetic oligonucleotide"
  source: /note="Description of Artificial Sequence: Synthetic oligonucleotide"
guuguacgggacuguaacatt

SEQ ID NO: 192 - DNA, 21 bp, Artificial Sequence
  source: /note="Description of Combined DNA/RNA Molecule: Synthetic oligonucleotide"
  source: /note="Description of Artificial Sequence: Synthetic oligonucleotide"
uguuacagucccguacaactt

SEQ ID NO: 193 - DNA, 21 bp, Artificial Sequence
  source: /note="Description of Combined DNA/RNA Molecule: Synthetic oligonucleotide"
  source: /note="Description of Artificial Sequence: Synthetic oligonucleotide"
uguacgggacuguaacacctt

SEQ ID NO: 194 - DNA, 21 bp, Artificial Sequence
  source: /note="Description of Combined DNA/RNA Molecule: Synthetic oligonucleotide"
  source: /note="Description of Artificial Sequence: Synthetic oligonucleotide"
gguguuacagucccguacatt

SEQ ID NO: 195 - DNA, 21 bp, Artificial Sequence
  source: /note="Description of Combined DNA/RNA Molecule: Synthetic oligonucleotide"
  source: /note="Description of Artificial Sequence: Synthetic oligonucleotide"
uguacgggacuguaacacctt

SEQ ID NO: 196 - DNA, 21 bp, Artificial Sequence
  source: /note="Description of Combined DNA/RNA Molecule: Synthetic oligonucleotide"
  source: /note="Description of Artificial Sequence: Synthetic oligonucleotide"
gguguuacagucccguacatt

SEQ ID NO: 197 - DNA, 21 bp, Artificial Sequence
  source: /note="Description of Combined DNA/RNA Molecule: Synthetic oligonucleotide"
  source: /note="Description of Artificial Sequence: Synthetic oligonucleotide"
uguacgggacuguaacacctt

SEQ ID NO: 198 - DNA, 21 bp, Artificial Sequence
  source: /note="Description of Combined DNA/RNA Molecule: Synthetic oligonucleotide"
  source: /note="Description of Artificial Sequence: Synthetic oligonucleotide"
gguguuacagucccguacatt

SEQ ID NO: 199 - DNA, 21 bp, Artificial Sequence
  source: /note="Description of Combined DNA/RNA Molecule: Synthetic oligonucleotide"
  source: /note="Description of Artificial Sequence: Synthetic oligonucleotide"
uguacgggacuguaacacctt

SEQ ID NO: 200 - DNA, 21 bp, Artificial Sequence
  source: /note="Description of Combined DNA/RNA Molecule: Synthetic oligonucleotide"
  source: /note="Description of Artificial Sequence: Synthetic oligonucleotide"
gguguuacagucccguacatt

SEQ ID NO: 201 - DNA, 21 bp, Artificial Sequence
  source: /note="Description of Combined DNA/RNA Molecule: Synthetic oligonucleotide"
  source: /note="Description of Artificial Sequence: Synthetic oligonucleotide"
guacgggacuguaacaccutt

SEQ ID NO: 202 - DNA, 21 bp, Artificial Sequence
  source: /note="Description of Combined DNA/RNA Molecule: Synthetic oligonucleotide"
  source: /note="Description of Artificial Sequence: Synthetic oligonucleotide"
agguguuacagucccguactt

SEQ ID NO: 203 - DNA, 21 bp, Artificial Sequence
  source: /note="Description of Combined DNA/RNA Molecule: Synthetic oligonucleotide"
  source: /note="Description of Artificial Sequence: Synthetic oligonucleotide"
guacgggacuguaacaccutt

SEQ ID NO: 204 - DNA, 21 bp, Artificial Sequence
  source: /note="Description of Combined DNA/RNA Molecule: Synthetic oligonucleotide"
  source: /note="Description of Artificial Sequence: Synthetic oligonucleotide"
agguguuacagucccguactt

SEQ ID NO: 205 - DNA, 21 bp, Artificial Sequence
  source: /note="Description of Combined DNA/RNA Molecule: Synthetic oligonucleotide"
  source: /note="Description of Artificial Sequence: Synthetic oligonucleotide"
cagccugauuuugguacautt

SEQ ID NO: 206 - DNA, 21 bp, Artificial Sequence
  source: /note="Description of Combined DNA/RNA Molecule: Synthetic oligonucleotide"
  source: /note="Description of Artificial Sequence: Synthetic oligonucleotide"
auguaccaaaaucaggcugtt

SEQ ID NO: 207 - DNA, 21 bp, Artificial Sequence
  source: /note="Description of Combined DNA/RNA Molecule: Synthetic oligonucleotide"
  source: /note="Description of Artificial Sequence: Synthetic oligonucleotide"
cagccugauuuugguacautt

SEQ ID NO: 208 - DNA, 21 bp, Artificial Sequence
  source: /note="Description of Combined DNA/RNA Molecule: Synthetic oligonucleotide"
  source: /note="Description of Artificial Sequence: Synthetic oligonucleotide"
auguaccaaaaucaggcugtt

SEQ ID NO: 209 - DNA, 21 bp, Artificial Sequence
  source: /note="Description of Combined DNA/RNA Molecule: Synthetic oligonucleotide"
  source: /note="Description of Artificial Sequence: Synthetic oligonucleotide"
cagccugauuuugguacautt

SEQ ID NO: 210 - DNA, 21 bp, Artificial Sequence
  source: /note="Description of Combined DNA/RNA Molecule: Synthetic oligonucleotide"
  source: /note="Description of Artificial Sequence: Synthetic oligonucleotide"
auguaccaaaaucaggcugtt

SEQ ID NO: 211 - DNA, 21 bp, Artificial Sequence
  source: /note="Description of Combined DNA/RNA Molecule: Synthetic oligonucleotide"
  source: /note="Description of Artificial Sequence: Synthetic oligonucleotide"
cagccugauuuugguacautt

SEQ ID NO: 212 - DNA, 21 bp, Artificial Sequence
  source: /note="Description of Combined DNA/RNA Molecule: Synthetic oligonucleotide"
  source: /note="Description of Artificial Sequence: Synthetic oligonucleotide"
auguaccaaaaucaggcugtt

SEQ ID NO: 213 - DNA, 21 bp, Artificial Sequence
  source: /note="Description of Combined DNA/RNA Molecule: Synthetic oligonucleotide"
  source: /note="Description of Artificial Sequence: Synthetic oligonucleotide"
gaauagggaggaauccaugtt

SEQ ID NO: 214 - DNA, 21 bp, Artificial Sequence
  source: /note="Description of Combined DNA/RNA Molecule: Synthetic oligonucleotide"
  source: /note="Description of Artificial Sequence: Synthetic oligonucleotide"
cauggauuccucccuauuctt

SEQ ID NO: 215 - DNA, 21 bp, Artificial Sequence
  source: /note="Description of Combined DNA/RNA Molecule: Synthetic oligonucleotide"
  source: /note="Description of Artificial Sequence: Synthetic oligonucleotide"
gaauagggaggaauccaugtt

SEQ ID NO: 216 - DNA, 21 bp, Artificial Sequence
  source: /note="Description of Combined DNA/RNA Molecule: Synthetic oligonucleotide"
  source: /note="Description of Artificial Sequence: Synthetic oligonucleotide"
cauggauuccucccuauuctt

SEQ ID NO: 217 - DNA, 21 bp, Artificial Sequence
  source: /note="Description of Combined DNA/RNA Molecule: Synthetic oligonucleotide"
  source: /note="Description of Artificial Sequence: Synthetic oligonucleotide"
gaauagggaggaauccaugtt

SEQ ID NO: 218 - DNA, 21 bp, Artificial Sequence
  source: /note="Description of Combined DNA/RNA Molecule: Synthetic oligonucleotide"
  source: /note="Description of Artificial Sequence: Synthetic oligonucleotide"
cauggauuccucccuauuctt

SEQ ID NO: 219 - DNA, 21 bp, Artificial Sequence
  source: /note="Description of Combined DNA/RNA Molecule: Synthetic oligonucleotide"
  source: /note="Description of Artificial Sequence: Synthetic oligonucleotide"
gaauagggaggaauccaugtt

SEQ ID NO: 220 - DNA, 21 bp, Artificial Sequence
  source: /note="Description of Combined DNA/RNA Molecule: Synthetic oligonucleotide"
  source: /note="Description of Artificial Sequence: Synthetic oligonucleotide"
cauggauuccucccuauuctt

SEQ ID NO: 221 - DNA, 21 bp, Artificial Sequence
  source: /note="Description of Combined DNA/RNA Molecule: Synthetic oligonucleotide"
  source: /note="Description of Artificial Sequence: Synthetic oligonucleotide"
aagugcugaauagggaggatt

SEQ ID NO: 222 - DNA, 21 bp, Artificial Sequence
  source: /note="Description of Combined DNA/RNA Molecule: Synthetic oligonucleotide"
  source: /note="Description of Artificial Sequence: Synthetic oligonucleotide"
uccucccuauucagcacuutt

SEQ ID NO: 223 - DNA, 21 bp, Artificial Sequence
  source: /note="Description of Combined DNA/RNA Molecule: Synthetic oligonucleotide"
  source: /note="Description of Artificial Sequence: Synthetic oligonucleotide"
aagugcugaauagggaggatt

SEQ ID NO: 224 - DNA, 21 bp, Artificial Sequence
  source: /note="Description of Combined DNA/RNA Molecule: Synthetic oligonucleotide"
  source: /note="Description of Artificial Sequence: Synthetic oligonucleotide"
uccucccuauucagcacuutt

SEQ ID NO: 225 - DNA, 21 bp, Artificial Sequence
  source: /note="Description of Combined DNA/RNA Molecule: Synthetic oligonucleotide"
  source: /note="Description of Artificial Sequence: Synthetic oligonucleotide"
aagugcugaauagggaggatt

SEQ ID NO: 226 - DNA, 21 bp, Artificial Sequence
  source: /note="Description of Combined DNA/RNA Molecule: Synthetic oligonucleotide"
  source: /note="Description of Artificial Sequence: Synthetic oligonucleotide"
uccucccuauucagcacuutt

SEQ ID NO: 227 - DNA, 21 bp, Artificial Sequence
  source: /note="Description of Combined DNA/RNA Molecule: Synthetic oligonucleotide"
  source: /note="Description of Artificial Sequence: Synthetic oligonucleotide"
aagugcugaauagggaggatt

SEQ ID NO: 228 - DNA, 21 bp, Artificial Sequence
  source: /note="Description of Combined DNA/RNA Molecule: Synthetic oligonucleotide"
  source: /note="Description of Artificial Sequence: Synthetic oligonucleotide"
uccucccuauucagcacuutt

SEQ ID NO: 229 - DNA, 21 bp, Artificial Sequence
  source: /note="Description of Combined DNA/RNA Molecule: Synthetic oligonucleotide"
  source: /note="Description of Artificial Sequence: Synthetic oligonucleotide"
aggcugcugcuacuauagatt

SEQ ID NO: 230 - DNA, 21 bp, Artificial Sequence
  source: /note="Description of Combined DNA/RNA Molecule: Synthetic oligonucleotide"
  source: /note="Description of Artificial Sequence: Synthetic oligonucleotide"
ucuauaguagcagcagccutt

SEQ ID NO: 231 - DNA, 21 bp, Artificial Sequence
  source: /note="Description of Combined DNA/RNA Molecule: Synthetic oligonucleotide"
  source: /note="Description of Artificial Sequence: Synthetic oligonucleotide"
aggcugcugcuacuauagatt

SEQ ID NO: 232 - DNA, 21 bp, Artificial Sequence
  source: /note="Description of Combined DNA/RNA Molecule: Synthetic oligonucleotide"
  source: /note="Description of Artificial Sequence: Synthetic oligonucleotide"
ucuauaguagcagcagccutt

SEQ ID NO: 233 - DNA, 21 bp, Artificial Sequence
  source: /note="Description of Combined DNA/RNA Molecule: Synthetic oligonucleotide"
  source: /note="Description of Artificial Sequence: Synthetic oligonucleotide"
aggcugcugcuacuauagatt

SEQ ID NO: 234 - DNA, 21 bp, Artificial Sequence
  source: /note="Description of Combined DNA/RNA Molecule: Synthetic oligonucleotide"
  source: /note="Description of Artificial Sequence: Synthetic oligonucleotide"
ucuauaguagcagcagccutt

SEQ ID NO: 235 - DNA, 21 bp, Artificial Sequence
  source: /note="Description of Combined DNA/RNA Molecule: Synthetic oligonucleotide"
  source: /note="Description of Artificial Sequence: Synthetic oligonucleotide"
aggcugcugcuacuauagatt

SEQ ID NO: 236 - DNA, 21 bp, Artificial Sequence
  source: /note="Description of Combined DNA/RNA Molecule: Synthetic oligonucleotide"
  source: /note="Description of Artificial Sequence: Synthetic oligonucleotide"
ucuauaguagcagcagccutt

SEQ ID NO: 237 - DNA, 21 bp, Artificial Sequence
  source: /note="Description of Combined DNA/RNA Molecule: Synthetic oligonucleotide"
  source: /note="Description of Artificial Sequence: Synthetic oligonucleotide"
agacagccauaugcaguagtt

SEQ ID NO: 238 - DNA, 21 bp, Artificial Sequence
  source: /note="Description of Combined DNA/RNA Molecule: Synthetic oligonucleotide"
  source: /note="Description of Artificial Sequence: Synthetic oligonucleotide"
cuacugcauauggcugucutt

SEQ ID NO: 239 - DNA, 21 bp, Artificial Sequence
  source: /note="Description of Combined DNA/RNA Molecule: Synthetic oligonucleotide"
  source: /note="Description of Artificial Sequence: Synthetic oligonucleotide"
agacagccauaugcaguagtt

SEQ ID NO: 240 - DNA, 21 bp, Artificial Sequence
  source: /note="Description of Combined DNA/RNA Molecule: Synthetic oligonucleotide"
  source: /note="Description of Artificial Sequence: Synthetic oligonucleotide"
cuacugcauauggcugucutt

SEQ ID NO: 241 - DNA, 21 bp, Artificial Sequence
  source: /note="Description of Combined DNA/RNA Molecule: Synthetic oligonucleotide"
  source: /note="Description of Artificial Sequence: Synthetic oligonucleotide"
uucagguucaugggugccgtt

SEQ ID NO: 242 - DNA, 21 bp, Artificial Sequence
  source: /note="Description of Combined DNA/RNA Molecule: Synthetic oligonucleotide"
  source: /note="Description of Artificial Sequence: Synthetic oligonucleotide"
cggcacccaugaaccugaatt

SEQ ID NO: 243 - DNA, 21 bp, Artificial Sequence
  source: /note="Description of Combined DNA/RNA Molecule: Synthetic oligonucleotide"
  source: /note="Description of Artificial Sequence: Synthetic oligonucleotide"
uucagguucaugggugccgtt

SEQ ID NO: 244 - DNA, 21 bp, Artificial Sequence
  source: /note="Description of Combined DNA/RNA Molecule: Synthetic oligonucleotide"
  source: /note="Description of Artificial Sequence: Synthetic oligonucleotide"
cggcacccaugaaccugaatt

SEQ ID NO: 245 - DNA, 21 bp, Artificial Sequence
  source: /note="Description of Combined DNA/RNA Molecule: Synthetic oligonucleotide"
  source: /note="Description of Artificial Sequence: Synthetic oligonucleotide"
uagacagccauaugcaguatt

SEQ ID NO: 246 - DNA, 21 bp, Artificial Sequence
  source: /note="Description of Combined DNA/RNA Molecule: Synthetic oligonucleotide"
  source: /note="Description of Artificial Sequence: Synthetic oligonucleotide"
uacugcauauggcugucuatt

SEQ ID NO: 247 - DNA, 21 bp, Artificial Sequence
  source: /note="Description of Combined DNA/RNA Molecule: Synthetic oligonucleotide"
  source: /note="Description of Artificial Sequence: Synthetic oligonucleotide"
uagacagccauaugcaguatt

SEQ ID NO: 248 - DNA, 21 bp, Artificial Sequence
  source: /note="Description of Combined DNA/RNA Molecule: Synthetic oligonucleotide"
  source: /note="Description of Artificial Sequence: Synthetic oligonucleotide"
uacugcauauggcugucuatt

SEQ ID NO: 249 - DNA, 21 bp, Artificial Sequence
  source: /note="Description of Combined DNA/RNA Molecule: Synthetic oligonucleotide"
  source: /note="Description of Artificial Sequence: Synthetic oligonucleotide"
uagacagccauaugcaguatt

SEQ ID NO: 250 - DNA, 21 bp, Artificial Sequence
  source: /note="Description of Combined DNA/RNA Molecule: Synthetic oligonucleotide"
  source: /note="Description of Artificial Sequence: Synthetic oligonucleotide"
uacugcauauggcugucuatt

SEQ ID NO: 251 - DNA, 21 bp, Artificial Sequence
  source: /note="Description of Combined DNA/RNA Molecule: Synthetic oligonucleotide"
  source: /note="Description of Artificial Sequence: Synthetic oligonucleotide"
uagacagccauaugcaguatt

SEQ ID NO: 252 - DNA, 21 bp, Artificial Sequence
  source: /note="Description of Combined DNA/RNA Molecule: Synthetic oligonucleotide"
  source: /note="Description of Artificial Sequence: Synthetic oligonucleotide"
uacugcauauggcugucuatt

SEQ ID NO: 253 - DNA, 21 bp, Artificial Sequence
  source: /note="Description of Combined DNA/RNA Molecule: Synthetic oligonucleotide"
  source: /note="Description of Artificial Sequence: Synthetic oligonucleotide"
ggagcaugacuuuaacccatt

SEQ ID NO: 254 - DNA, 21 bp, Artificial Sequence
  source: /note="Description of Combined DNA/RNA Molecule: Synthetic oligonucleotide"
  source: /note="Description of Artificial Sequence: Synthetic oligonucleotide"
uggguuaaagucaugcucctt

SEQ ID NO: 255 - DNA, 21 bp, Artificial Sequence
  source: /note="Description of Combined DNA/RNA Molecule: Synthetic oligonucleotide"
  source: /note="Description of Artificial Sequence: Synthetic oligonucleotide"
ggagcaugacuuuaacccatt

SEQ ID NO: 256 - DNA, 21 bp, Artificial Sequence
  source: /note="Description of Combined DNA/RNA Molecule: Synthetic oligonucleotide"
  source: /note="Description of Artificial Sequence: Synthetic oligonucleotide"
uggguuaaagucaugcucctt

SEQ ID NO: 257 - DNA, 21 bp, Artificial Sequence
  source: /note="Description of Combined DNA/RNA Molecule: Synthetic oligonucleotide"
  source: /note="Description of Artificial Sequence: Synthetic oligonucleotide"
ggagcaugacuuuaacccatt

SEQ ID NO: 258 - DNA, 21 bp, Artificial Sequence
  source: /note="Description of Combined DNA/RNA Molecule: Synthetic oligonucleotide"
  source: /note="Description of Artificial Sequence: Synthetic oligonucleotide"
uggguuaaagucaugcucctt

SEQ ID NO: 259 - DNA, 21 bp, Artificial Sequence
  source: /note="Description of Combined DNA/RNA Molecule: Synthetic oligonucleotide"
  source: /note="Description of Artificial Sequence: Synthetic oligonucleotide"
ggagcaugacuuuaacccatt

SEQ ID NO: 260 - DNA, 21 bp, Artificial Sequence
  source: /note="Description of Combined DNA/RNA Molecule: Synthetic oligonucleotide"
  source: /note="Description of Artificial Sequence: Synthetic oligonucleotide"
uggguuaaagucaugcucctt

SEQ ID NO: 261 - DNA, 21 bp, Artificial Sequence
  source: /note="Description of Combined DNA/RNA Molecule: Synthetic oligonucleotide"
  source: /note="Description of Artificial Sequence: Synthetic oligonucleotide"
guugccuuuacuuuuagggtt

SEQ ID NO: 262 - DNA, 21 bp, Artificial Sequence
  source: /note="Description of Combined DNA/RNA Molecule: Synthetic oligonucleotide"
  source: /note="Description of Artificial Sequence: Synthetic oligonucleotide"
cccuaaaaguaaaggcaactt

SEQ ID NO: 263 - DNA, 21 bp, Artificial Sequence
  source: /note="Description of Combined DNA/RNA Molecule: Synthetic oligonucleotide"
  source: /note="Description of Artificial Sequence: Synthetic oligonucleotide"
guugccuuuacuuuuagggtt

SEQ ID NO: 264 - DNA, 21 bp, Artificial Sequence
  source: /note="Description of Combined DNA/RNA Molecule: Synthetic oligonucleotide"
  source: /note="Description of Artificial Sequence: Synthetic oligonucleotide"
cccuaaaaguaaaggcaactt

SEQ ID NO: 265 - DNA, 21 bp, Artificial Sequence
  source: /note="Description of Combined DNA/RNA Molecule: Synthetic oligonucleotide"
  source: /note="Description of Artificial Sequence: Synthetic oligonucleotide"
ugugacuuaacccaagaagtt

SEQ ID NO: 266 - DNA, 21 bp, Artificial Sequence
  source: /note="Description of Combined DNA/RNA Molecule: Synthetic oligonucleotide"
  source: /note="Description of Artificial Sequence: Synthetic oligonucleotide"
cuucuuggguuaagucacatt

SEQ ID NO: 267 - DNA, 21 bp, Artificial Sequence
  source: /note="Description of Combined DNA/RNA Molecule: Synthetic oligonucleotide"
  source: /note="Description of Artificial Sequence: Synthetic oligonucleotide"
ugugacuuaacccaagaagtt

SEQ ID NO: 268 - DNA, 21 bp, Artificial Sequence
  source: /note="Description of Combined DNA/RNA Molecule: Synthetic oligonucleotide"
  source: /note="Description of Artificial Sequence: Synthetic oligonucleotide"
cuucuuggguuaagucacatt

SEQ ID NO: 269 - DNA, 21 bp, Artificial Sequence
  source: /note="Description of Combined DNA/RNA Molecule: Synthetic oligonucleotide"
  source: /note="Description of Artificial Sequence: Synthetic oligonucleotide"
ugugacuuaacccaagaagtt

SEQ ID NO: 270 - DNA, 21 bp, Artificial Sequence
  source: /note="Description of Combined DNA/RNA Molecule: Synthetic oligonucleotide"
  source: /note="Description of Artificial Sequence: Synthetic oligonucleotide"
cuucuuggguuaagucacatt

SEQ ID NO: 271 - DNA, 21 bp, Artificial Sequence
  source: /note="Description of Combined DNA/RNA Molecule: Synthetic oligonucleotide"
  source: /note="Description of Artificial Sequence: Synthetic oligonucleotide"
ugugacuuaacccaagaagtt

SEQ ID NO: 272 - DNA, 21 bp, Artificial Sequence
  source: /note="Description of Combined DNA/RNA Molecule: Synthetic oligonucleotide"
  source: /note="Description of Artificial Sequence: Synthetic oligonucleotide"
cuucuuggguuaagucacatt

SEQ ID NO: 273 - DNA, 21 bp, Artificial Sequence
  source: /note="Description of Combined DNA/RNA Molecule: Synthetic oligonucleotide"
  source: /note="Description of Artificial Sequence: Synthetic oligonucleotide"
uauugcuuugauugcuucatt

SEQ ID NO: 274 - DNA, 21 bp, Artificial Sequence
  source: /note="Description of Combined DNA/RNA Molecule: Synthetic oligonucleotide"
  source: /note="Description of Artificial Sequence: Synthetic oligonucleotide"
ugaagcaaucaaagcaauatt

SEQ ID NO: 275 - DNA, 21 bp, Artificial Sequence
  source: /note="Description of Combined DNA/RNA Molecule: Synthetic oligonucleotide"
  source: /note="Description of Artificial Sequence: Synthetic oligonucleotide"
uauugcuuugauugcuucatt

SEQ ID NO: 276 - DNA, 21 bp, Artificial Sequence
  source: /note="Description of Combined DNA/RNA Molecule: Synthetic oligonucleotide"
  source: /note="Description of Artificial Sequence: Synthetic oligonucleotide"
ugaagcaaucaaagcaauatt

SEQ ID NO: 277 - DNA, 21 bp, Artificial Sequence
  source: /note="Description of Combined DNA/RNA Molecule: Synthetic oligonucleotide"
  source: /note="Description of Artificial Sequence: Synthetic oligonucleotide"
uauugcuuugauugcuucatt

SEQ ID NO: 278 - DNA, 21 bp, Artificial Sequence
  source: /note="Description of Combined DNA/RNA Molecule: Synthetic oligonucleotide"
  source: /note="Description of Artificial Sequence: Synthetic oligonucleotide"
ugaagcaaucaaagcaauatt

SEQ ID NO: 279 - DNA, 21 bp, Artificial Sequence
  source: /note="Description of Combined DNA/RNA Molecule: Synthetic oligonucleotide"
  source: /note="Description of Artificial Sequence: Synthetic oligonucleotide"
uauugcuuugauugcuucatt

SEQ ID NO: 280 - DNA, 21 bp, Artificial Sequence
  source: /note="Description of Combined DNA/RNA Molecule: Synthetic oligonucleotide"
  source: /note="Description of Artificial Sequence: Synthetic oligonucleotide"
ugaagcaaucaaagcaauatt

SEQ ID NO: 281 - DNA, 21 bp, Artificial Sequence
  source: /note="Description of Combined DNA/RNA Molecule: Synthetic oligonucleotide"
  source: /note="Description of Artificial Sequence: Synthetic oligonucleotide"
auauccuguugaauguuggtt

SEQ ID NO: 282 - DNA, 21 bp, Artificial Sequence
  source: /note="Description of Combined DNA/RNA Molecule: Synthetic oligonucleotide"
  source: /note="Description of Artificial Sequence: Synthetic oligonucleotide"
ccaacauucaacaggauautt

SEQ ID NO: 283 - DNA, 21 bp, Artificial Sequence
  source: /note="Description of Combined DNA/RNA Molecule: Synthetic oligonucleotide"
  source: /note="Description of Artificial Sequence: Synthetic oligonucleotide"
uuuauugcaaggaauggcctt

SEQ ID NO: 284 - DNA, 21 bp, Artificial Sequence
  source: /note="Description of Combined DNA/RNA Molecule: Synthetic oligonucleotide"
  source: /note="Description of Artificial Sequence: Synthetic oligonucleotide"
ggccauuccuugcaauaaatt

SEQ ID NO: 285 - DNA, 21 bp, Artificial Sequence
  source: /note="Description of Combined DNA/RNA Molecule: Synthetic oligonucleotide"
  source: /note="Description of Artificial Sequence: Synthetic oligonucleotide"
uuuauugcaaggaauggcctt

SEQ ID NO: 286 - DNA, 21 bp, Artificial Sequence
  source: /note="Description of Combined DNA/RNA Molecule: Synthetic oligonucleotide"
  source: /note="Description of Artificial Sequence: Synthetic oligonucleotide"
ggccauuccuugcaauaaatt

SEQ ID NO: 287 - DNA, 21 bp, Artificial Sequence
  source: /note="Description of Combined DNA/RNA Molecule: Synthetic oligonucleotide"
  source: /note="Description of Artificial Sequence: Synthetic oligonucleotide"
uggaagaaacuacuugggctt

SEQ ID NO: 288 - DNA, 21 bp, Artificial Sequence
  source: /note="Description of Combined DNA/RNA Molecule: Synthetic oligonucleotide"
  source: /note="Description of Artificial Sequence: Synthetic oligonucleotide"
gcccaaguaguuucuuccatt

SEQ ID NO: 289 - DNA, 21 bp, Artificial Sequence
  source: /note="Description of Combined DNA/RNA Molecule: Synthetic oligonucleotide"
  source: /note="Description of Artificial Sequence: Synthetic oligonucleotide"
uggaagaaacuacuugggctt

SEQ ID NO: 290 - DNA, 21 bp, Artificial Sequence
  source: /note="Description of Combined DNA/RNA Molecule: Synthetic oligonucleotide"
  source: /note="Description of Artificial Sequence: Synthetic oligonucleotide"
gcccaaguaguuucuuccatt

SEQ ID NO: 291 - DNA, 21 bp, Artificial Sequence
  source: /note="Description of Combined DNA/RNA Molecule: Synthetic oligonucleotide"
  source: /note="Description of Artificial Sequence: Synthetic oligonucleotide"
uggaagaaacuacuugggctt

SEQ ID NO: 292 - DNA, 21 bp, Artificial Sequence
  source: /note="Description of Combined DNA/RNA Molecule: Synthetic oligonucleotide"
  source: /note="Description of Artificial Sequence: Synthetic oligonucleotide"
gcccaaguaguuucuuccatt

SEQ ID NO: 293 - DNA, 21 bp, Artificial Sequence
  source: /note="Description of Combined DNA/RNA Molecule: Synthetic oligonucleotide"
  source: /note="Description of Artificial Sequence: Synthetic oligonucleotide"
uggaagaaacuacuugggctt

SEQ ID NO: 294 - DNA, 21 bp, Artificial Sequence
  source: /note="Description of Combined DNA/RNA Molecule: Synthetic oligonucleotide"
  source: /note="Description of Artificial Sequence: Synthetic oligonucleotide"
gcccaaguaguuucuuccatt

SEQ ID NO: 295 - DNA, 21 bp, Artificial Sequence
  source: /note="Description of Combined DNA/RNA Molecule: Synthetic oligonucleotide"
  source: /note="Description of Artificial Sequence: Synthetic oligonucleotide"
aagacccuaaagacuuucctt

SEQ ID NO: 296 - DNA, 21 bp, Artificial Sequence
  source: /note="Description of Combined DNA/RNA Molecule: Synthetic oligonucleotide"
  source: /note="Description of Artificial Sequence: Synthetic oligonucleotide"
ggaaagucuuuagggucuutt

SEQ ID NO: 297 - DNA, 21 bp, Artificial Sequence
  source: /note="Description of Combined DNA/RNA Molecule: Synthetic oligonucleotide"
  source: /note="Description of Artificial Sequence: Synthetic oligonucleotide"
aagacccuaaagacuuucctt

SEQ ID NO: 298 - DNA, 21 bp, Artificial Sequence
  source: /note="Description of Combined DNA/RNA Molecule: Synthetic oligonucleotide"
  source: /note="Description of Artificial Sequence: Synthetic oligonucleotide"
ggaaagucuuuagggucuutt

SEQ ID NO: 299 - DNA, 21 bp, Artificial Sequence
  source: /note="Description of Combined DNA/RNA Molecule: Synthetic oligonucleotide"
  source: /note="Description of Artificial Sequence: Synthetic oligonucleotide"
aagacccuaaagacuuucctt

SEQ ID NO: 300 - DNA, 21 bp, Artificial Sequence
  source: /note="Description of Combined DNA/RNA Molecule: Synthetic oligonucleotide"
  source: /note="Description of Artificial Sequence: Synthetic oligonucleotide"
ggaaagucuuuagggucuutt

SEQ ID NO: 301 - DNA, 21 bp, Artificial Sequence
  source: /note="Description of Combined DNA/RNA Molecule: Synthetic oligonucleotide"
  source: /note="Description of Artificial Sequence: Synthetic oligonucleotide"
aagacccuaaagacuuucctt

SEQ ID NO: 302 - DNA, 21 bp, Artificial Sequence
  source: /note="Description of Combined DNA/RNA Molecule: Synthetic oligonucleotide"
  source: /note="Description of Artificial Sequence: Synthetic oligonucleotide"
ggaaagucuuuagggucuutt

SEQ ID NO: 303 - DNA, 21 bp, Artificial Sequence
  source: /note="Description of Combined DNA/RNA Molecule: Synthetic oligonucleotide"
  source: /note="Description of Artificial Sequence: Synthetic oligonucleotide"
uggauguugccuuuacuuutt

SEQ ID NO: 304 - DNA, 21 bp, Artificial Sequence
  source: /note="Description of Combined DNA/RNA Molecule: Synthetic oligonucleotide"
  source: /note="Description of Artificial Sequence: Synthetic oligonucleotide"
aaaguaaaggcaacauccatt

SEQ ID NO: 305 - DNA, 21 bp, Artificial Sequence
  source: /note="Description of Combined DNA/RNA Molecule: Synthetic oligonucleotide"
  source: /note="Description of Artificial Sequence: Synthetic oligonucleotide"
uggauguugccuuuacuuutt

SEQ ID NO: 306 - DNA, 21 bp, Artificial Sequence
  source: /note="Description of Combined DNA/RNA Molecule: Synthetic oligonucleotide"
  source: /note="Description of Artificial Sequence: Synthetic oligonucleotide"
aaaguaaaggcaacauccatt

SEQ ID NO: 307 - DNA, 21 bp, Artificial Sequence
  source: /note="Description of Combined DNA/RNA Molecule: Synthetic oligonucleotide"
  source: /note="Description of Artificial Sequence: Synthetic oligonucleotide"
uggauguugccuuuacuuutt

SEQ ID NO: 308 - DNA, 21 bp, Artificial Sequence
  source: /note="Description of Combined DNA/RNA Molecule: Synthetic oligonucleotide"
  source: /note="Description of Artificial Sequence: Synthetic oligonucleotide"
aaaguaaaggcaacauccatt

SEQ ID NO: 309 - DNA, 21 bp, Artificial Sequence
  source: /note="Description of Combined DNA/RNA Molecule: Synthetic oligonucleotide"
  source: /note="Description of Artificial Sequence: Synthetic oligonucleotide"
uggauguugccuuuacuuutt

SEQ ID NO: 310 - DNA, 21 bp, Artificial Sequence
  source: /note="Description of Combined DNA/RNA Molecule: Synthetic oligonucleotide"
  source: /note="Description of Artificial Sequence: Synthetic oligonucleotide"
aaaguaaaggcaacauccatt

SEQ ID NO: 311 - DNA, 21 bp, Artificial Sequence
  source: /note="Description of Combined DNA/RNA Molecule: Synthetic oligonucleotide"
  source: /note="Description of Artificial Sequence: Synthetic oligonucleotide"
uuugauugcuucagacaautt

SEQ ID NO: 312 - DNA, 21 bp, Artificial Sequence
  source: /note="Description of Combined DNA/RNA Molecule: Synthetic oligonucleotide"
  source: /note="Description of Artificial Sequence: Synthetic oligonucleotide"
auugucugaagcaaucaaatt

SEQ ID NO: 313 - DNA, 21 bp, Artificial Sequence
  source: /note="Description of Combined DNA/RNA Molecule: Synthetic oligonucleotide"
  source: /note="Description of Artificial Sequence: Synthetic oligonucleotide"
uuugauugcuucagacaautt

SEQ ID NO: 314 - DNA, 21 bp, Artificial Sequence
  source: /note="Description of Combined DNA/RNA Molecule: Synthetic oligonucleotide"
  source: /note="Description of Artificial Sequence: Synthetic oligonucleotide"
auugucugaagcaaucaaatt

SEQ ID NO: 315 - DNA, 21 bp, Artificial Sequence
  source: /note="Description of Combined DNA/RNA Molecule: Synthetic oligonucleotide"
  source: /note="Description of Artificial Sequence: Synthetic oligonucleotide"
aauagggaggaauccauggtt

SEQ ID NO: 316 - DNA, 21 bp, Artificial Sequence
  source: /note="Description of Combined DNA/RNA Molecule: Synthetic oligonucleotide"
  source: /note="Description of Artificial Sequence: Synthetic oligonucleotide"
ccauggauuccucccuauutt

SEQ ID NO: 317 - DNA, 21 bp, Artificial Sequence
  source: /note="Description of Combined DNA/RNA Molecule: Synthetic oligonucleotide"
  source: /note="Description of Artificial Sequence: Synthetic oligonucleotide"
aauagggaggaauccauggtt

SEQ ID NO: 318 - DNA, 21 bp, Artificial Sequence
  source: /note="Description of Combined DNA/RNA Molecule: Synthetic oligonucleotide"
  source: /note="Description of Artificial Sequence: Synthetic oligonucleotide"
ccauggauuccucccuauutt

SEQ ID NO: 319 - DNA, 21 bp, Artificial Sequence
  source: /note="Description of Combined DNA/RNA Molecule: Synthetic oligonucleotide"
  source: /note="Description of Artificial Sequence: Synthetic oligonucleotide"
ggacaaagugcugaauaggtt

SEQ ID NO: 320 - DNA, 21 bp, Artificial Sequence
  source: /note="Description of Combined DNA/RNA Molecule: Synthetic oligonucleotide"
  source: /note="Description of Artificial Sequence: Synthetic oligonucleotide"
ccuauucagcacuuugucctt

SEQ ID NO: 321 - DNA, 21 bp, Artificial Sequence
  source: /note="Description of Combined DNA/RNA Molecule: Synthetic oligonucleotide"
  source: /note="Description of Artificial Sequence: Synthetic oligonucleotide"
ggacaaagugcugaauaggtt

SEQ ID NO: 322 - DNA, 21 bp, Artificial Sequence
  source: /note="Description of Combined DNA/RNA Molecule: Synthetic oligonucleotide"
  source: /note="Description of Artificial Sequence: Synthetic oligonucleotide"
ccuauucagcacuuugucctt

SEQ ID NO: 323 - DNA, 21 bp, Artificial Sequence
  source: /note="Description of Combined DNA/RNA Molecule: Synthetic oligonucleotide"
  source: /note="Description of Artificial Sequence: Synthetic oligonucleotide"
ggacaaagugcugaauaggtt

SEQ ID NO: 324 - DNA, 21 bp, Artificial Sequence
  source: /note="Description of Combined DNA/RNA Molecule: Synthetic oligonucleotide"
  source: /note="Description of Artificial Sequence: Synthetic oligonucleotide"
ccuauucagcacuuugucctt

SEQ ID NO: 325 - DNA, 21 bp, Artificial Sequence
  source: /note="Description of Combined DNA/RNA Molecule: Synthetic oligonucleotide"
  source: /note="Description of Artificial Sequence: Synthetic oligonucleotide"
ggacaaagugcugaauaggtt

SEQ ID NO: 326 - DNA, 21 bp, Artificial Sequence
  source: /note="Description of Combined DNA/RNA Molecule: Synthetic oligonucleotide"
  source: /note="Description of Artificial Sequence: Synthetic oligonucleotide"
ccuauucagcacuuugucctt

SEQ ID NO: 327 - DNA, 21 bp, Artificial Sequence
  source: /note="Description of Combined DNA/RNA Molecule: Synthetic oligonucleotide"
  source: /note="Description of Artificial Sequence: Synthetic oligonucleotide"
uggacaaagugcugaauagtt

SEQ ID NO: 328 - DNA, 21 bp, Artificial Sequence
  source: /note="Description of Combined DNA/RNA Molecule: Synthetic oligonucleotide"
  source: /note="Description of Artificial Sequence: Synthetic oligonucleotide"
cuauucagcacuuuguccatt

SEQ ID NO: 329 - DNA, 21 bp, Artificial Sequence
  source: /note="Description of Combined DNA/RNA Molecule: Synthetic oligonucleotide"
  source: /note="Description of Artificial Sequence: Synthetic oligonucleotide"
uggacaaagugcugaauagtt

SEQ ID NO: 330 - DNA, 21 bp, Artificial Sequence
  source: /note="Description of Combined DNA/RNA Molecule: Synthetic oligonucleotide"
  source: /note="Description of Artificial Sequence: Synthetic oligonucleotide"
cuauucagcacuuuguccatt

SEQ ID NO: 331 - DNA, 21 bp, Artificial Sequence
  source: /note="Description of Combined DNA/RNA Molecule: Synthetic oligonucleotide"
  source: /note="Description of Artificial Sequence: Synthetic oligonucleotide"
aaauugcaucccuugcuactt

SEQ ID NO: 332 - DNA, 21 bp, Artificial Sequence
  source: /note="Description of Combined DNA/RNA Molecule: Synthetic oligonucleotide"
  source: /note="Description of Artificial Sequence: Synthetic oligonucleotide"
guagcaagggaugcaauuutt

SEQ ID NO: 333 - DNA, 21 bp, Artificial Sequence
  source: /note="Description of Combined DNA/RNA Molecule: Synthetic oligonucleotide"
  source: /note="Description of Artificial Sequence: Synthetic oligonucleotide"
aaauugcaucccuugcuactt

SEQ ID NO: 334 - DNA, 21 bp, Artificial Sequence
  source: /note="Description of Combined DNA/RNA Molecule: Synthetic oligonucleotide"
  source: /note="Description of Artificial Sequence: Synthetic oligonucleotide"
guagcaagggaugcaauuutt

SEQ ID NO: 335 - DNA, 21 bp, Artificial Sequence
  source: /note="Description of Combined DNA/RNA Molecule: Synthetic oligonucleotide"
  source: /note="Description of Artificial Sequence: Synthetic oligonucleotide"
gcaucccuugcuacuguagtt

SEQ ID NO: 336 - DNA, 21 bp, Artificial Sequence
  source: /note="Description of Combined DNA/RNA Molecule: Synthetic oligonucleotide"
  source: /note="Description of Artificial Sequence: Synthetic oligonucleotide"
cuacaguagcaagggaugctt

SEQ ID NO: 337 - DNA, 21 bp, Artificial Sequence
  source: /note="Description of Combined DNA/RNA Molecule: Synthetic oligonucleotide"
  source: /note="Description of Artificial Sequence: Synthetic oligonucleotide"
aaaaaaagguagaagaccctt

SEQ ID NO: 338 - DNA, 21 bp, Artificial Sequence
  source: /note="Description of Combined DNA/RNA Molecule: Synthetic oligonucleotide"
  source: /note="Description of Artificial Sequence: Synthetic oligonucleotide"
gggucuucuaccuuuuuuutt

SEQ ID NO: 339 - DNA, 21 bp, Artificial Sequence
  source: /note="Description of Combined DNA/RNA Molecule: Synthetic oligonucleotide"
  source: /note="Description of Artificial Sequence: Synthetic oligonucleotide"
aaaaaaagguagaagaccctt

SEQ ID NO: 340 - DNA, 21 bp, Artificial Sequence
  source: /note="Description of Combined DNA/RNA Molecule: Synthetic oligonucleotide"
  source: /note="Description of Artificial Sequence: Synthetic oligonucleotide"
gggucuucuaccuuuuuuutt

SEQ ID NO: 341 - DNA, 21 bp, Artificial Sequence
  source: /note="Description of Combined DNA/RNA Molecule: Synthetic oligonucleotide"
  source: /note="Description of Artificial Sequence: Synthetic oligonucleotide"
aaaaaaagguagaagaccctt

SEQ ID NO: 342 - DNA, 21 bp, Artificial Sequence
  source: /note="Description of Combined DNA/RNA Molecule: Synthetic oligonucleotide"
  source: /note="Description of Artificial Sequence: Synthetic oligonucleotide"
gggucuucuaccuuuuuuutt

SEQ ID NO: 343 - DNA, 21 bp, Artificial Sequence
  source: /note="Description of Combined DNA/RNA Molecule: Synthetic oligonucleotide"
  source: /note="Description of Artificial Sequence: Synthetic oligonucleotide"
aaaaaaagguagaagaccctt

SEQ ID NO: 344 - DNA, 21 bp, Artificial Sequence
  source: /note="Description of Combined DNA/RNA Molecule: Synthetic oligonucleotide"
  source: /note="Description of Artificial Sequence: Synthetic oligonucleotide"
gggucuucuaccuuuuuuutt

SEQ ID NO: 345 - DNA, 21 bp, Artificial Sequence
  source: /note="Description of Combined DNA/RNA Molecule: Synthetic oligonucleotide"
  source: /note="Description of Artificial Sequence: Synthetic oligonucleotide"
acagagcacaaggcguacctt

SEQ ID NO: 346 - DNA, 21 bp, Artificial Sequence
  source: /note="Description of Combined DNA/RNA Molecule: Synthetic oligonucleotide"
  source: /note="Description of Artificial Sequence: Synthetic oligonucleotide"
gguacgccuugugcucugutt

SEQ ID NO: 347 - DNA, 21 bp, Artificial Sequence
  source: /note="Description of Combined DNA/RNA Molecule: Synthetic oligonucleotide"
  source: /note="Description of Artificial Sequence: Synthetic oligonucleotide"
acagagcacaaggcguacctt

SEQ ID NO: 348 - DNA, 21 bp, Artificial Sequence
  source: /note="Description of Combined DNA/RNA Molecule: Synthetic oligonucleotide"
  source: /note="Description of Artificial Sequence: Synthetic oligonucleotide"
gguacgccuugugcucugutt

SEQ ID NO: 349 - DNA, 21 bp, Artificial Sequence
  source: /note="Description of Combined DNA/RNA Molecule: Synthetic oligonucleotide"
  source: /note="Description of Artificial Sequence: Synthetic oligonucleotide"
ugauuuugguacauggaautt

SEQ ID NO: 350 - DNA, 21 bp, Artificial Sequence
  source: /note="Description of Combined DNA/RNA Molecule: Synthetic oligonucleotide"
  source: /note="Description of Artificial Sequence: Synthetic oligonucleotide"
auuccauguaccaaaaucatt

SEQ ID NO: 351 - DNA, 21 bp, Artificial Sequence
  source: /note="Description of Combined DNA/RNA Molecule: Synthetic oligonucleotide"
  source: /note="Description of Artificial Sequence: Synthetic oligonucleotide"
ugauuuugguacauggaautt

SEQ ID NO: 352 - DNA, 21 bp, Artificial Sequence
  source: /note="Description of Combined DNA/RNA Molecule: Synthetic oligonucleotide"
  source: /note="Description of Artificial Sequence: Synthetic oligonucleotide"
auuccauguaccaaaaucatt

SEQ ID NO: 353 - DNA, 21 bp, Artificial Sequence
  source: /note="Description of Combined DNA/RNA Molecule: Synthetic oligonucleotide"
  source: /note="Description of Artificial Sequence: Synthetic oligonucleotide"
ugauuuugguacauggaautt

SEQ ID NO: 354 - DNA, 21 bp, Artificial Sequence
  source: /note="Description of Combined DNA/RNA Molecule: Synthetic oligonucleotide"
  source: /note="Description of Artificial Sequence: Synthetic oligonucleotide"
auuccauguaccaaaaucatt

SEQ ID NO: 355 - DNA, 21 bp, Artificial Sequence
  source: /note="Description of Combined DNA/RNA Molecule: Synthetic oligonucleotide"
  source: /note="Description of Artificial Sequence: Synthetic oligonucleotide"
ugauuuugguacauggaautt

SEQ ID NO: 356 - DNA, 21 bp, Artificial Sequence
  source: /note="Description of Combined DNA/RNA Molecule: Synthetic oligonucleotide"
  source: /note="Description of Artificial Sequence: Synthetic oligonucleotide"
auuccauguaccaaaaucatt

SEQ ID NO: 357 - DNA, 21 bp, Artificial Sequence
  source: /note="Description of Combined DNA/RNA Molecule: Synthetic oligonucleotide"
  source: /note="Description of Artificial Sequence: Synthetic oligonucleotide"
ggguuguacgggacuguaatt

SEQ ID NO: 358 - DNA, 21 bp, Artificial Sequence
  source: /note="Description of Combined DNA/RNA Molecule: Synthetic oligonucleotide"
  source: /note="Description of Artificial Sequence: Synthetic oligonucleotide"
uuacagucccguacaaccctt

SEQ ID NO: 359 - DNA, 21 bp, Artificial Sequence
  source: /note="Description of Combined DNA/RNA Molecule: Synthetic oligonucleotide"
  source: /note="Description of Artificial Sequence: Synthetic oligonucleotide"
ggguuguacgggacuguaatt

SEQ ID NO: 360 - DNA, 21 bp, Artificial Sequence
  source: /note="Description of Combined DNA/RNA Molecule: Synthetic oligonucleotide"
  source: /note="Description of Artificial Sequence: Synthetic oligonucleotide"
uuacagucccguacaaccctt

SEQ ID NO: 361 - DNA, 21 bp, Artificial Sequence
  source: /note="Description of Combined DNA/RNA Molecule: Synthetic oligonucleotide"
  source: /note="Description of Artificial Sequence: Synthetic oligonucleotide"
gguuguacgggacuguaactt

SEQ ID NO: 362 - DNA, 21 bp, Artificial Sequence
  source: /note="Description of Combined DNA/RNA Molecule: Synthetic oligonucleotide"
  source: /note="Description of Artificial Sequence: Synthetic oligonucleotide"
guuacagucccguacaacctt

SEQ ID NO: 363 - DNA, 21 bp, Artificial Sequence
  source: /note="Description of Combined DNA/RNA Molecule: Synthetic oligonucleotide"
  source: /note="Description of Artificial Sequence: Synthetic oligonucleotide"
gguuguacgggacuguaactt

SEQ ID NO: 364 - DNA, 21 bp, Artificial Sequence
  source: /note="Description of Combined DNA/RNA Molecule: Synthetic oligonucleotide"
  source: /note="Description of Artificial Sequence: Synthetic oligonucleotide"
guuacagucccguacaacctt

SEQ ID NO: 365 - DNA, 21 bp, Artificial Sequence
  source: /note="Description of Combined DNA/RNA Molecule: Synthetic oligonucleotide"
  source: /note="Description of Artificial Sequence: Synthetic oligonucleotide"
gguuguacgggacuguaactt

SEQ ID NO: 366 - DNA, 21 bp, Artificial Sequence
  source: /note="Description of Combined DNA/RNA Molecule: Synthetic oligonucleotide"
  source: /note="Description of Artificial Sequence: Synthetic oligonucleotide"
guuacagucccguacaacctt

SEQ ID NO: 367 - DNA, 21 bp, Artificial Sequence
  source: /note="Description of Combined DNA/RNA Molecule: Synthetic oligonucleotide"
  source: /note="Description of Artificial Sequence: Synthetic oligonucleotide"
gguuguacgggacuguaactt

SEQ ID NO: 368 - DNA, 21 bp, Artificial Sequence
  source: /note="Description of Combined DNA/RNA Molecule: Synthetic oligonucleotide"
  source: /note="Description of Artificial Sequence: Synthetic oligonucleotide"
guuacagucccguacaacctt

SEQ ID NO: 369 - DNA, 21 bp, Artificial Sequence
  source: /note="Description of Combined DNA/RNA Molecule: Synthetic oligonucleotide"
  source: /note="Description of Artificial Sequence: Synthetic oligonucleotide"
acgggacuguaacaccugctt

SEQ ID NO: 370 - DNA, 21 bp, Artificial Sequence
  source: /note="Description of Combined DNA/RNA Molecule: Synthetic oligonucleotide"
  source: /note="Description of Artificial Sequence: Synthetic oligonucleotide"
gcagguguuacagucccgutt

SEQ ID NO: 371 - DNA, 21 bp, Artificial Sequence
  source: /note="Description of Combined DNA/RNA Molecule: Synthetic oligonucleotide"
  source: /note="Description of Artificial Sequence: Synthetic oligonucleotide"
gggacuguaacaccugcuctt

SEQ ID NO: 372 - DNA, 21 bp, Artificial Sequence
  source: /note="Description of Combined DNA/RNA Molecule: Synthetic oligonucleotide"
  source: /note="Description of Artificial Sequence: Synthetic oligonucleotide"
gagcagguguuacaguccctt

SEQ ID NO: 373 - DNA, 21 bp, Artificial Sequence
  source: /note="Description of Combined DNA/RNA Molecule: Synthetic oligonucleotide"
  source: /note="Description of Artificial Sequence: Synthetic oligonucleotide"
gggacuguaacaccugcuctt

SEQ ID NO: 374 - DNA, 21 bp, Artificial Sequence
  source: /note="Description of Combined DNA/RNA Molecule: Synthetic oligonucleotide"
  source: /note="Description of Artificial Sequence: Synthetic oligonucleotide"
gagcagguguuacaguccctt

SEQ ID NO: 375 - DNA, 21 bp, Artificial Sequence
  source: /note="Description of Combined DNA/RNA Molecule: Synthetic oligonucleotide"
  source: /note="Description of Artificial Sequence: Synthetic oligonucleotide"
gggacuguaacaccugcuctt

SEQ ID NO: 376 - DNA, 21 bp, Artificial Sequence
  source: /note="Description of Combined DNA/RNA Molecule: Synthetic oligonucleotide"
  source: /note="Description of Artificial Sequence: Synthetic oligonucleotide"
gagcagguguuacaguccctt

SEQ ID NO: 377 - DNA, 21 bp, Artificial Sequence
  source: /note="Description of Combined DNA/RNA Molecule: Synthetic oligonucleotide"
  source: /note="Description of Artificial Sequence: Synthetic oligonucleotide"
gggacuguaacaccugcuctt

SEQ ID NO: 378 - DNA, 21 bp, Artificial Sequence
  source: /note="Description of Combined DNA/RNA Molecule: Synthetic oligonucleotide"
  source: /note="Description of Artificial Sequence: Synthetic oligonucleotide"
gagcagguguuacaguccctt

SEQ ID NO: 379 - DNA, 21 bp, Artificial Sequence
  source: /note="Description of Combined DNA/RNA Molecule: Synthetic oligonucleotide"
  source: /note="Description of Artificial Sequence: Synthetic oligonucleotide"
acuccagaaaugggugacctt

SEQ ID NO: 380 - DNA, 21 bp, Artificial Sequence
  source: /note="Description of Combined DNA/RNA Molecule: Synthetic oligonucleotide"
  source: /note="Description of Artificial Sequence: Synthetic oligonucleotide"
ggucacccauuucuggagutt

SEQ ID NO: 381 - DNA, 21 bp, Artificial Sequence
  source: /note="Description of Combined DNA/RNA Molecule: Synthetic oligonucleotide"
  source: /note="Description of Artificial Sequence: Synthetic oligonucleotide"
acuccagaaaugggugacctt

SEQ ID NO: 382 - DNA, 21 bp, Artificial Sequence
  source: /note="Description of Combined DNA/RNA Molecule: Synthetic oligonucleotide"
  source: /note="Description of Artificial Sequence: Synthetic oligonucleotide"
ggucacccauuucuggagutt

SEQ ID NO: 383 - DNA, 21 bp, Artificial Sequence
  source: /note="Description of Combined DNA/RNA Molecule: Synthetic oligonucleotide"
  source: /note="Description of Artificial Sequence: Synthetic oligonucleotide"
ccugauuuugguacauggatt

SEQ ID NO: 384 - DNA, 21 bp, Artificial Sequence
  source: /note="Description of Combined DNA/RNA Molecule: Synthetic oligonucleotide"
  source: /note="Description of Artificial Sequence: Synthetic oligonucleotide"
uccauguaccaaaaucaggtt

SEQ ID NO: 385 - DNA, 21 bp, Artificial Sequence
  source: /note="Description of Combined DNA/RNA Molecule: Synthetic oligonucleotide"
  source: /note="Description of Artificial Sequence: Synthetic oligonucleotide"
ccugauuuugguacauggatt

SEQ ID NO: 386 - DNA, 21 bp, Artificial Sequence
  source: /note="Description of Combined DNA/RNA Molecule: Synthetic oligonucleotide"
  source: /note="Description of Artificial Sequence: Synthetic oligonucleotide"
uccauguaccaaaaucaggtt

SEQ ID NO: 387 - DNA, 21 bp, Artificial Sequence
  source: /note="Description of Combined DNA/RNA Molecule: Synthetic oligonucleotide"
  source: /note="Description of Artificial Sequence: Synthetic oligonucleotide"
caaagugcugaauagggagtt

SEQ ID NO: 388 - DNA, 21 bp, Artificial Sequence
  source: /note="Description of Combined DNA/RNA Molecule: Synthetic oligonucleotide"
  source: /note="Description of Artificial Sequence: Synthetic oligonucleotide"
cucccuauucagcacuuugtt

SEQ ID NO: 389 - DNA, 21 bp, Artificial Sequence
  source: /note="Description of Combined DNA/RNA Molecule: Synthetic oligonucleotide"
  source: /note="Description of Artificial Sequence: Synthetic oligonucleotide"
caaagugcugaauagggagtt

SEQ ID NO: 390 - DNA, 21 bp, Artificial Sequence
  source: /note="Description of Combined DNA/RNA Molecule: Synthetic oligonucleotide"
  source: /note="Description of Artificial Sequence: Synthetic oligonucleotide"
cucccuauucagcacuuugtt

SEQ ID NO: 391 - DNA, 21 bp, Artificial Sequence
  source: /note="Description of Combined DNA/RNA Molecule: Synthetic oligonucleotide"
  source: /note="Description of Artificial Sequence: Synthetic oligonucleotide"
caaagugcugaauagggagtt

SEQ ID NO: 392 - DNA, 21 bp, Artificial Sequence
  source: /note="Description of Combined DNA/RNA Molecule: Synthetic oligonucleotide"
  source: /note="Description of Artificial Sequence: Synthetic oligonucleotide"
cucccuauucagcacuuugtt

SEQ ID NO: 393 - DNA, 21 bp, Artificial Sequence
  source: /note="Description of Combined DNA/RNA Molecule: Synthetic oligonucleotide"
  source: /note="Description of Artificial Sequence: Synthetic oligonucleotide"
caaagugcugaauagggagtt

SEQ ID NO: 394 - DNA, 21 bp, Artificial Sequence
  source: /note="Description of Combined DNA/RNA Molecule: Synthetic oligonucleotide"
  source: /note="Description of Artificial Sequence: Synthetic oligonucleotide"
cucccuauucagcacuuugtt

SEQ ID NO: 395 - DNA, 21 bp, Artificial Sequence
  source: /note="Description of Combined DNA/RNA Molecule: Synthetic oligonucleotide"
  source: /note="Description of Artificial Sequence: Synthetic oligonucleotide"
ccagggaaauucccuuguutt

SEQ ID NO: 396 - DNA, 21 bp, Artificial Sequence
  source: /note="Description of Combined DNA/RNA Molecule: Synthetic oligonucleotide"
  source: /note="Description of Artificial Sequence: Synthetic oligonucleotide"
aacaagggaauuucccuggtt

SEQ ID NO: 397 - DNA, 21 bp, Artificial Sequence
  source: /note="Description of Combined DNA/RNA Molecule: Synthetic oligonucleotide"
  source: /note="Description of Artificial Sequence: Synthetic oligonucleotide"
ccagggaaauucccuuguutt

SEQ ID NO: 398 - DNA, 21 bp, Artificial Sequence
  source: /note="Description of Combined DNA/RNA Molecule: Synthetic oligonucleotide"
  source: /note="Description of Artificial Sequence: Synthetic oligonucleotide"
aacaagggaauuucccuggtt

SEQ ID NO: 399 - DNA, 21 bp, Artificial Sequence
  source: /note="Description of Combined DNA/RNA Molecule: Synthetic oligonucleotide"
  source: /note="Description of Artificial Sequence: Synthetic oligonucleotide"
aggccagggaaauucccuutt

SEQ ID NO: 400 - DNA, 21 bp, Artificial Sequence
  source: /note="Description of Combined DNA/RNA Molecule: Synthetic oligonucleotide"
  source: /note="Description of Artificial Sequence: Synthetic oligonucleotide"
aagggaauuucccuggccutt

SEQ ID NO: 401 - DNA, 21 bp, Artificial Sequence
  source: /note="Description of Combined DNA/RNA Molecule: Synthetic oligonucleotide"
  source: /note="Description of Artificial Sequence: Synthetic oligonucleotide"
aggccagggaaauucccuutt

SEQ ID NO: 402 - DNA, 21 bp, Artificial Sequence
  source: /note="Description of Combined DNA/RNA Molecule: Synthetic oligonucleotide"
  source: /note="Description of Artificial Sequence: Synthetic oligonucleotide"
aagggaauuucccuggccutt

SEQ ID NO: 403 - DNA, 21 bp, Artificial Sequence
  source: /note="Description of Combined DNA/RNA Molecule: Synthetic oligonucleotide"
  source: /note="Description of Artificial Sequence: Synthetic oligonucleotide"
aggccagggaaauucccuutt

SEQ ID NO: 404 - DNA, 21 bp, Artificial Sequence
  source: /note="Description of Combined DNA/RNA Molecule: Synthetic oligonucleotide"
  source: /note="Description of Artificial Sequence: Synthetic oligonucleotide"
aagggaauuucccuggccutt

SEQ ID NO: 405 - DNA, 21 bp, Artificial Sequence
  source: /note="Description of Combined DNA/RNA Molecule: Synthetic oligonucleotide"
  source: /note="Description of Artificial Sequence: Synthetic oligonucleotide"
aggccagggaaauucccuutt

SEQ ID NO: 406 - DNA, 21 bp, Artificial Sequence
  source: /note="Description of Combined DNA/RNA Molecule: Synthetic oligonucleotide"
  source: /note="Description of Artificial Sequence: Synthetic oligonucleotide"
aagggaauuucccuggccutt

SEQ ID NO: 407 - DNA, 21 bp, Artificial Sequence
  source: /note="Description of Combined DNA/RNA Molecule: Synthetic oligonucleotide"
  source: /note="Description of Artificial Sequence: Synthetic oligonucleotide"
uaguugcuacuguuucugatt

SEQ ID NO: 408 - DNA, 21 bp, Artificial Sequence
  source: /note="Description of Combined DNA/RNA Molecule: Synthetic oligonucleotide"
  source: /note="Description of Artificial Sequence: Synthetic oligonucleotide"
ucagaaacaguagcaacuatt

SEQ ID NO: 409 - DNA, 21 bp, Artificial Sequence
  source: /note="Description of Combined DNA/RNA Molecule: Synthetic oligonucleotide"
  source: /note="Description of Artificial Sequence: Synthetic oligonucleotide"
uaguugcuacuguuucugatt

SEQ ID NO: 410 - DNA, 21 bp, Artificial Sequence
  source: /note="Description of Combined DNA/RNA Molecule: Synthetic oligonucleotide"
  source: /note="Description of Artificial Sequence: Synthetic oligonucleotide"
ucagaaacaguagcaacuatt

SEQ ID NO: 411 - DNA, 21 bp, Artificial Sequence
  source: /note="Description of Combined DNA/RNA Molecule: Synthetic oligonucleotide"
  source: /note="Description of Artificial Sequence: Synthetic oligonucleotide"
cugcugcuacuauagaagutt

SEQ ID NO: 412 - DNA, 21 bp, Artificial Sequence
  source: /note="Description of Combined DNA/RNA Molecule: Synthetic oligonucleotide"
  source: /note="Description of Artificial Sequence: Synthetic oligonucleotide"
acuucuauaguagcagcagtt

SEQ ID NO: 413 - DNA, 21 bp, Artificial Sequence
  source: /note="Description of Combined DNA/RNA Molecule: Synthetic oligonucleotide"
  source: /note="Description of Artificial Sequence: Synthetic oligonucleotide"
cugcugcuacuauagaagutt

SEQ ID NO: 414 - DNA, 21 bp, Artificial Sequence
  source: /note="Description of Combined DNA/RNA Molecule: Synthetic oligonucleotide"
  source: /note="Description of Artificial Sequence: Synthetic oligonucleotide"
acuucuauaguagcagcagtt

SEQ ID NO: 415 - DNA, 21 bp, Artificial Sequence
  source: /note="Description of Combined DNA/RNA Molecule: Synthetic oligonucleotide"
  source: /note="Description of Artificial Sequence: Synthetic oligonucleotide"
ugcugcuacuauagaaguutt

SEQ ID NO: 416 - DNA, 21 bp, Artificial Sequence
  source: /note="Description of Combined DNA/RNA Molecule: Synthetic oligonucleotide"
  source: /note="Description of Artificial Sequence: Synthetic oligonucleotide"
aacuucuauaguagcagcatt

SEQ ID NO: 417 - DNA, 21 bp, Artificial Sequence
  source: /note="Description of Combined DNA/RNA Molecule: Synthetic oligonucleotide"
  source: /note="Description of Artificial Sequence: Synthetic oligonucleotide"
ugcugcuacuauagaaguutt

SEQ ID NO: 418 - DNA, 21 bp, Artificial Sequence
  source: /note="Description of Combined DNA/RNA Molecule: Synthetic oligonucleotide"
  source: /note="Description of Artificial Sequence: Synthetic oligonucleotide"
aacuucuauaguagcagcatt

SEQ ID NO: 419 - DNA, 21 bp, Artificial Sequence
  source: /note="Description of Combined DNA/RNA Molecule: Synthetic oligonucleotide"
  source: /note="Description of Artificial Sequence: Synthetic oligonucleotide"
ugcugcuacuauagaaguutt

SEQ ID NO: 420 - DNA, 21 bp, Artificial Sequence
  source: /note="Description of Combined DNA/RNA Molecule: Synthetic oligonucleotide"
  source: /note="Description of Artificial Sequence: Synthetic oligonucleotide"
aacuucuauaguagcagcatt

SEQ ID NO: 421 - DNA, 21 bp, Artificial Sequence
  source: /note="Description of Combined DNA/RNA Molecule: Synthetic oligonucleotide"
  source: /note="Description of Artificial Sequence: Synthetic oligonucleotide"
ugcugcuacuauagaaguutt

SEQ ID NO: 422 - DNA, 21 bp, Artificial Sequence
  source: /note="Description of Combined DNA/RNA Molecule: Synthetic oligonucleotide"
  source: /note="Description of Artificial Sequence: Synthetic oligonucleotide"
aacuucuauaguagcagcatt

SEQ ID NO: 423 - DNA, 21 bp, Artificial Sequence
  source: /note="Description of Combined DNA/RNA Molecule: Synthetic oligonucleotide"
  source: /note="Description of Artificial Sequence: Synthetic oligonucleotide"
gcugcuacuauagaaguugtt

SEQ ID NO: 424 - DNA, 21 bp, Artificial Sequence
  source: /note="Description of Combined DNA/RNA Molecule: Synthetic oligonucleotide"
  source: /note="Description of Artificial Sequence: Synthetic oligonucleotide"
caacuucuauaguagcagctt

SEQ ID NO: 425 - DNA, 21 bp, Artificial Sequence
  source: /note="Description of Combined DNA/RNA Molecule: Synthetic oligonucleotide"
  source: /note="Description of Artificial Sequence: Synthetic oligonucleotide"
gcugcuacuauagaaguugtt

SEQ ID NO: 426 - DNA, 21 bp, Artificial Sequence
  source: /note="Description of Combined DNA/RNA Molecule: Synthetic oligonucleotide"
  source: /note="Description of Artificial Sequence: Synthetic oligonucleotide"
caacuucuauaguagcagctt

SEQ ID NO: 427 - DNA, 21 bp, Artificial Sequence
  source: /note="Description of Combined DNA/RNA Molecule: Synthetic oligonucleotide"
  source: /note="Description of Artificial Sequence: Synthetic oligonucleotide"
cugcuacuauagaaguugatt

SEQ ID NO: 428 - DNA, 21 bp, Artificial Sequence
  source: /note="Description of Combined DNA/RNA Molecule: Synthetic oligonucleotide"
  source: /note="Description of Artificial Sequence: Synthetic oligonucleotide"
ucaacuucuauaguagcagtt

SEQ ID NO: 429 - DNA, 21 bp, Artificial Sequence
  source: /note="Description of Combined DNA/RNA Molecule: Synthetic oligonucleotide"
  source: /note="Description of Artificial Sequence: Synthetic oligonucleotide"
ugcuacuauagaaguugaatt

SEQ ID NO: 430 - DNA, 21 bp, Artificial Sequence
  source: /note="Description of Combined DNA/RNA Molecule: Synthetic oligonucleotide"
  source: /note="Description of Artificial Sequence: Synthetic oligonucleotide"
uucaacuucuauaguagcatt

SEQ ID NO: 431 - DNA, 21 bp, Artificial Sequence
  source: /note="Description of Combined DNA/RNA Molecule: Synthetic oligonucleotide"
  source: /note="Description of Artificial Sequence: Synthetic oligonucleotide"
ugcuacuauagaaguugaatt

SEQ ID NO: 432 - DNA, 21 bp, Artificial Sequence
  source: /note="Description of Combined DNA/RNA Molecule: Synthetic oligonucleotide"
  source: /note="Description of Artificial Sequence: Synthetic oligonucleotide"
uucaacuucuauaguagcatt

SEQ ID NO: 433 - DNA, 21 bp, Artificial Sequence
  source: /note="Description of Combined DNA/RNA Molecule: Synthetic oligonucleotide"
  source: /note="Description of Artificial Sequence: Synthetic oligonucleotide"
ugcuacuauagaaguugaatt

SEQ ID NO: 434 - DNA, 21 bp, Artificial Sequence
  source: /note="Description of Combined DNA/RNA Molecule: Synthetic oligonucleotide"
  source: /note="Description of Artificial Sequence: Synthetic oligonucleotide"
uucaacuucuauaguagcatt

SEQ ID NO: 435 - DNA, 21 bp, Artificial Sequence
  source: /note="Description of Combined DNA/RNA Molecule: Synthetic oligonucleotide"
  source: /note="Description of Artificial Sequence: Synthetic oligonucleotide"
ugcuacuauagaaguugaatt

SEQ ID NO: 436 - DNA, 21 bp, Artificial Sequence
  source: /note="Description of Combined DNA/RNA Molecule: Synthetic oligonucleotide"
  source: /note="Description of Artificial Sequence: Synthetic oligonucleotide"
uucaacuucuauaguagcatt

SEQ ID NO: 437 - DNA, 21 bp, Artificial Sequence
  source: /note="Description of Combined DNA/RNA Molecule: Synthetic oligonucleotide"
  source: /note="Description of Artificial Sequence: Synthetic oligonucleotide"
cagaagacuacuaugauautt

SEQ ID NO: 438 - DNA, 21 bp, Artificial Sequence
  source: /note="Description of Combined DNA/RNA Molecule: Synthetic oligonucleotide"
  source: /note="Description of Artificial Sequence: Synthetic oligonucleotide"
auaucauaguagucuucugtt

SEQ ID NO: 439 - DNA, 21 bp, Artificial Sequence
  source: /note="Description of Combined DNA/RNA Molecule: Synthetic oligonucleotide"
  source: /note="Description of Artificial Sequence: Synthetic oligonucleotide"
cagaagacuacuaugauautt

SEQ ID NO: 440 - DNA, 21 bp, Artificial Sequence
  source: /note="Description of Combined DNA/RNA Molecule: Synthetic oligonucleotide"
  source: /note="Description of Artificial Sequence: Synthetic oligonucleotide"
auaucauaguagucuucugtt

SEQ ID NO: 441 - DNA, 21 bp, Artificial Sequence
  source: /note="Description of Combined DNA/RNA Molecule: Synthetic oligonucleotide"
  source: /note="Description of Artificial Sequence: Synthetic oligonucleotide"
aaauuuuauauaagaaacutt

SEQ ID NO: 442 - DNA, 21 bp, Artificial Sequence
  source: /note="Description of Combined DNA/RNA Molecule: Synthetic oligonucleotide"
  source: /note="Description of Artificial Sequence: Synthetic oligonucleotide"
aguuucuuauauaaaauuutt

SEQ ID NO: 443 - DNA, 21 bp, Artificial Sequence
  source: /note="Description of Combined DNA/RNA Molecule: Synthetic oligonucleotide"
  source: /note="Description of Artificial Sequence: Synthetic oligonucleotide"
aaauuuuauauaagaaacutt

SEQ ID NO: 444 - DNA, 21 bp, Artificial Sequence
  source: /note="Description of Combined DNA/RNA Molecule: Synthetic oligonucleotide"
  source: /note="Description of Artificial Sequence: Synthetic oligonucleotide"
aguuucuuauauaaaauuutt

SEQ ID NO: 445 - DNA, 21 bp, Artificial Sequence
  source: /note="Description of Combined DNA/RNA Molecule: Synthetic oligonucleotide"
  source: /note="Description of Artificial Sequence: Synthetic oligonucleotide"
aaauuuuauauaagaaacutt

SEQ ID NO: 446 - DNA, 21 bp, Artificial Sequence
  source: /note="Description of Combined DNA/RNA Molecule: Synthetic oligonucleotide"
  source: /note="Description of Artificial Sequence: Synthetic oligonucleotide"
aguuucuuauauaaaauuutt

SEQ ID NO: 447 - DNA, 21 bp, Artificial Sequence
  source: /note="Description of Combined DNA/RNA Molecule: Synthetic oligonucleotide"
  source: /note="Description of Artificial Sequence: Synthetic oligonucleotide"
aaauuuuauauaagaaacutt

SEQ ID NO: 448 - DNA, 21 bp, Artificial Sequence
  source: /note="Description of Combined DNA/RNA Molecule: Synthetic oligonucleotide"
  source: /note="Description of Artificial Sequence: Synthetic oligonucleotide"
aguuucuuauauaaaauuutt

SEQ ID NO: 449 - DNA, 21 bp, Artificial Sequence
  source: /note="Description of Combined DNA/RNA Molecule: Synthetic oligonucleotide"
  source: /note="Description of Artificial Sequence: Synthetic oligonucleotide"
auggaauaguucagagguutt

SEQ ID NO: 450 - DNA, 21 bp, Artificial Sequence
  source: /note="Description of Combined DNA/RNA Molecule: Synthetic oligonucleotide"
  source: /note="Description of Artificial Sequence: Synthetic oligonucleotide"
aaccucugaacuauuccautt

SEQ ID NO: 451 - DNA, 21 bp, Artificial Sequence
  source: /note="Description of Combined DNA/RNA Molecule: Synthetic oligonucleotide"
  source: /note="Description of Artificial Sequence: Synthetic oligonucleotide"
auggaauaguucagagguutt

SEQ ID NO: 452 - DNA, 21 bp, Artificial Sequence
  source: /note="Description of Combined DNA/RNA Molecule: Synthetic oligonucleotide"
  source: /note="Description of Artificial Sequence: Synthetic oligonucleotide"
aaccucugaacuauuccautt

SEQ ID NO: 453 - DNA, 21 bp, Artificial Sequence
  source: /note="Description of Combined DNA/RNA Molecule: Synthetic oligonucleotide"
  source: /note="Description of Artificial Sequence: Synthetic oligonucleotide"
cauggaauaguucagaggutt

SEQ ID NO: 454 - DNA, 21 bp, Artificial Sequence
  source: /note="Description of Combined DNA/RNA Molecule: Synthetic oligonucleotide"
  source: /note="Description of Artificial Sequence: Synthetic oligonucleotide"
accucugaacuauuccaugtt

SEQ ID NO: 455 - DNA, 21 bp, Artificial Sequence
  source: /note="Description of Combined DNA/RNA Molecule: Synthetic oligonucleotide"
  source: /note="Description of Artificial Sequence: Synthetic oligonucleotide"
cauggaauaguucagaggutt

SEQ ID NO: 456 - DNA, 21 bp, Artificial Sequence
  source: /note="Description of Combined DNA/RNA Molecule: Synthetic oligonucleotide"
  source: /note="Description of Artificial Sequence: Synthetic oligonucleotide"
accucugaacuauuccaugtt

SEQ ID NO: 457 - DNA, 21 bp, Artificial Sequence
  source: /note="Description of Combined DNA/RNA Molecule: Synthetic oligonucleotide"
  source: /note="Description of Artificial Sequence: Synthetic oligonucleotide"
cauggaauaguucagaggutt

SEQ ID NO: 458 - DNA, 21 bp, Artificial Sequence
  source: /note="Description of Combined DNA/RNA Molecule: Synthetic oligonucleotide"
  source: /note="Description of Artificial Sequence: Synthetic oligonucleotide"
accucugaacuauuccaugtt

SEQ ID NO: 459 - DNA, 21 bp, Artificial Sequence
  source: /note="Description of Combined DNA/RNA Molecule: Synthetic oligonucleotide"
  source: /note="Description of Artificial Sequence: Synthetic oligonucleotide"
cauggaauaguucagaggutt

SEQ ID NO: 460 - DNA, 21 bp, Artificial Sequence
  source: /note="Description of Combined DNA/RNA Molecule: Synthetic oligonucleotide"
  source: /note="Description of Artificial Sequence: Synthetic oligonucleotide"
accucugaacuauuccaugtt

SEQ ID NO: 461 - DNA, 21 bp, Artificial Sequence
  source: /note="Description of Combined DNA/RNA Molecule: Synthetic oligonucleotide"
  source: /note="Description of Artificial Sequence: Synthetic oligonucleotide"
acauggaauaguucagaggtt

SEQ ID NO: 462 - DNA, 21 bp, Artificial Sequence
  source: /note="Description of Combined DNA/RNA Molecule: Synthetic oligonucleotide"
  source: /note="Description of Artificial Sequence: Synthetic oligonucleotide"
ccucugaacuauuccaugutt

SEQ ID NO: 463 - DNA, 21 bp, Artificial Sequence
  source: /note="Description of Combined DNA/RNA Molecule: Synthetic oligonucleotide"
  source: /note="Description of Artificial Sequence: Synthetic oligonucleotide"
acauggaauaguucagaggtt

SEQ ID NO: 464 - DNA, 21 bp, Artificial Sequence
  source: /note="Description of Combined DNA/RNA Molecule: Synthetic oligonucleotide"
  source: /note="Description of Artificial Sequence: Synthetic oligonucleotide"
ccucugaacuauuccaugutt

SEQ ID NO: 465 - DNA, 21 bp, Artificial Sequence
  source: /note="Description of Combined DNA/RNA Molecule: Synthetic oligonucleotide"
  source: /note="Description of Artificial Sequence: Synthetic oligonucleotide"
gguacauggaauaguucagtt

SEQ ID NO: 466 - DNA, 21 bp, Artificial Sequence
  source: /note="Description of Combined DNA/RNA Molecule: Synthetic oligonucleotide"
  source: /note="Description of Artificial Sequence: Synthetic oligonucleotide"
cugaacuauuccauguacctt

SEQ ID NO: 467 - DNA, 21 bp, Artificial Sequence
  source: /note="Description of Combined DNA/RNA Molecule: Synthetic oligonucleotide"
  source: /note="Description of Artificial Sequence: Synthetic oligonucleotide"
gguacauggaauaguucagtt

SEQ ID NO: 468 - DNA, 21 bp, Artificial Sequence
  source: /note="Description of Combined DNA/RNA Molecule: Synthetic oligonucleotide"
  source: /note="Description of Artificial Sequence: Synthetic oligonucleotide"
cugaacuauuccauguacctt

SEQ ID NO: 469 - DNA, 21 bp, Artificial Sequence
  source: /note="Description of Combined DNA/RNA Molecule: Synthetic oligonucleotide"
  source: /note="Description of Artificial Sequence: Synthetic oligonucleotide"
gguacauggaauaguucagtt

SEQ ID NO: 470 - DNA, 21 bp, Artificial Sequence
  source: /note="Description of Combined DNA/RNA Molecule: Synthetic oligonucleotide"
  source: /note="Description of Artificial Sequence: Synthetic oligonucleotide"
cugaacuauuccauguacctt

SEQ ID NO: 471 - DNA, 21 bp, Artificial Sequence
  source: /note="Description of Combined DNA/RNA Molecule: Synthetic oligonucleotide"
  source: /note="Description of Artificial Sequence: Synthetic oligonucleotide"
gguacauggaauaguucagtt

SEQ ID NO: 472 - DNA, 21 bp, Artificial Sequence
  source: /note="Description of Combined DNA/RNA Molecule: Synthetic oligonucleotide"
  source: /note="Description of Artificial Sequence: Synthetic oligonucleotide"
cugaacuauuccauguacctt

SEQ ID NO: 473 - DNA, 21 bp, Artificial Sequence
  source: /note="Description of Combined DNA/RNA Molecule: Synthetic oligonucleotide"
  source: /note="Description of Artificial Sequence: Synthetic oligonucleotide"
ugguacauggaauaguucatt

SEQ ID NO: 474 - DNA, 21 bp, Artificial Sequence
  source: /note="Description of Combined DNA/RNA Molecule: Synthetic oligonucleotide"
  source: /note="Description of Artificial Sequence: Synthetic oligonucleotide"
ugaacuauuccauguaccatt

SEQ ID NO: 475 - DNA, 21 bp, Artificial Sequence
  source: /note="Description of Combined DNA/RNA Molecule: Synthetic oligonucleotide"
  source: /note="Description of Artificial Sequence: Synthetic oligonucleotide"
ugguacauggaauaguucatt

SEQ ID NO: 476 - DNA, 21 bp, Artificial Sequence
  source: /note="Description of Combined DNA/RNA Molecule: Synthetic oligonucleotide"
  source: /note="Description of Artificial Sequence: Synthetic oligonucleotide"
ugaacuauuccauguaccatt

SEQ ID NO: 477 - DNA, 21 bp, Artificial Sequence
  source: /note="Description of Combined DNA/RNA Molecule: Synthetic oligonucleotide"
  source: /note="Description of Artificial Sequence: Synthetic oligonucleotide"
ugguacauggaauaguucatt

SEQ ID NO: 478 - DNA, 21 bp, Artificial Sequence
  source: /note="Description of Combined DNA/RNA Molecule: Synthetic oligonucleotide"
  source: /note="Description of Artificial Sequence: Synthetic oligonucleotide"
ugaacuauuccauguaccatt

SEQ ID NO: 479 - DNA, 21 bp, Artificial Sequence
  source: /note="Description of Combined DNA/RNA Molecule: Synthetic oligonucleotide"
  source: /note="Description of Artificial Sequence: Synthetic oligonucleotide"
ugguacauggaauaguucatt

SEQ ID NO: 480 - DNA, 21 bp, Artificial Sequence
  source: /note="Description of Combined DNA/RNA Molecule: Synthetic oligonucleotide"
  source: /note="Description of Artificial Sequence: Synthetic oligonucleotide"
ugaacuauuccauguaccatt

SEQ ID NO: 481 - DNA, 21 bp, Artificial Sequence
  source: /note="Description of Combined DNA/RNA Molecule: Synthetic oligonucleotide"
  source: /note="Description of Artificial Sequence: Synthetic oligonucleotide"
cuuacuccugaaacauaugtt

SEQ ID NO: 482 - DNA, 21 bp, Artificial Sequence
  source: /note="Description of Combined DNA/RNA Molecule: Synthetic oligonucleotide"
  source: /note="Description of Artificial Sequence: Synthetic oligonucleotide"
cauauguuucaggaguaagtt

SEQ ID NO: 483 - DNA, 21 bp, Artificial Sequence
  source: /note="Description of Combined DNA/RNA Molecule: Synthetic oligonucleotide"
  source: /note="Description of Artificial Sequence: Synthetic oligonucleotide"
cuuacuccugaaacauaugtt

SEQ ID NO: 484 - DNA, 21 bp, Artificial Sequence
  source: /note="Description of Combined DNA/RNA Molecule: Synthetic oligonucleotide"
  source: /note="Description of Artificial Sequence: Synthetic oligonucleotide"
cauauguuucaggaguaagtt

SEQ ID NO: 485 - DNA, 21 bp, Artificial Sequence
  source: /note="Description of Combined DNA/RNA Molecule: Synthetic oligonucleotide"
  source: /note="Description of Artificial Sequence: Synthetic oligonucleotide"
auccagaagacuacuaugatt

SEQ ID NO: 486 - DNA, 21 bp, Artificial Sequence
  source: /note="Description of Combined DNA/RNA Molecule: Synthetic oligonucleotide"
  source: /note="Description of Artificial Sequence: Synthetic oligonucleotide"
ucauaguagucuucuggautt

SEQ ID NO: 487 - DNA, 21 bp, Artificial Sequence
  source: /note="Description of Combined DNA/RNA Molecule: Synthetic oligonucleotide"
  source: /note="Description of Artificial Sequence: Synthetic oligonucleotide"
uuuuggaagaaacuacuugtt

SEQ ID NO: 488 - DNA, 21 bp, Artificial Sequence
  source: /note="Description of Combined DNA/RNA Molecule: Synthetic oligonucleotide"
  source: /note="Description of Artificial Sequence: Synthetic oligonucleotide"
caaguaguuucuuccaaaatt

SEQ ID NO: 489 - DNA, 21 bp, Artificial Sequence
  source: /note="Description of Combined DNA/RNA Molecule: Synthetic oligonucleotide"
  source: /note="Description of Artificial Sequence: Synthetic oligonucleotide"
uuuuggaagaaacuacuugtt

SEQ ID NO: 490 - DNA, 21 bp, Artificial Sequence
  source: /note="Description of Combined DNA/RNA Molecule: Synthetic oligonucleotide"
  source: /note="Description of Artificial Sequence: Synthetic oligonucleotide"
caaguaguuucuuccaaaatt

SEQ ID NO: 491 - DNA, 21 bp, Artificial Sequence
  source: /note="Description of Combined DNA/RNA Molecule: Synthetic oligonucleotide"
  source: /note="Description of Artificial Sequence: Synthetic oligonucleotide"
uuggaagaaacuacuugggtt

SEQ ID NO: 492 - DNA, 21 bp, Artificial Sequence
  source: /note="Description of Combined DNA/RNA Molecule: Synthetic oligonucleotide"
  source: /note="Description of Artificial Sequence: Synthetic oligonucleotide"
cccaaguaguuucuuccaatt

SEQ ID NO: 493 - DNA, 21 bp, Artificial Sequence
  source: /note="Description of Combined DNA/RNA Molecule: Synthetic oligonucleotide"
  source: /note="Description of Artificial Sequence: Synthetic oligonucleotide"
uuggaagaaacuacuugggtt

SEQ ID NO: 494 - DNA, 21 bp, Artificial Sequence
  source: /note="Description of Combined DNA/RNA Molecule: Synthetic oligonucleotide"
  source: /note="Description of Artificial Sequence: Synthetic oligonucleotide"
cccaaguaguuucuuccaatt

SEQ ID NO: 495 - DNA, 21 bp, Artificial Sequence
  source: /note="Description of Combined DNA/RNA Molecule: Synthetic oligonucleotide"
  source: /note="Description of Artificial Sequence: Synthetic oligonucleotide"
augaagaccuguuuugccatt

SEQ ID NO: 496 - DNA, 21 bp, Artificial Sequence
  source: /note="Description of Combined DNA/RNA Molecule: Synthetic oligonucleotide"
  source: /note="Description of Artificial Sequence: Synthetic oligonucleotide"
uggcaaaacaggucuucautt

SEQ ID NO: 497 - DNA, 21 bp, Artificial Sequence
  source: /note="Description of Combined DNA/RNA Molecule: Synthetic oligonucleotide"
  source: /note="Description of Artificial Sequence: Synthetic oligonucleotide"
augaagaccuguuuugccatt

SEQ ID NO: 498 - DNA, 21 bp, Artificial Sequence
  source: /note="Description of Combined DNA/RNA Molecule: Synthetic oligonucleotide"
  source: /note="Description of Artificial Sequence: Synthetic oligonucleotide"
uggcaaaacaggucuucautt

SEQ ID NO: 499 - DNA, 21 bp, Artificial Sequence
  source: /note="Description of Combined DNA/RNA Molecule: Synthetic oligonucleotide"
  source: /note="Description of Artificial Sequence: Synthetic oligonucleotide"
gaugaagaccuguuuugcctt

SEQ ID NO: 500 - DNA, 21 bp, Artificial Sequence
  source: /note="Description of Combined DNA/RNA Molecule: Synthetic oligonucleotide"
  source: /note="Description of Artificial Sequence: Synthetic oligonucleotide"
ggcaaaacaggucuucauctt

SEQ ID NO: 501 - DNA, 21 bp, Artificial Sequence
  source: /note="Description of Combined DNA/RNA Molecule: Synthetic oligonucleotide"
  source: /note="Description of Artificial Sequence: Synthetic oligonucleotide"
gaugaagaccuguuuugcctt

SEQ ID NO: 502 - DNA, 21 bp, Artificial Sequence
  source: /note="Description of Combined DNA/RNA Molecule: Synthetic oligonucleotide"
  source: /note="Description of Artificial Sequence: Synthetic oligonucleotide"
ggcaaaacaggucuucauctt

SEQ ID NO: 503 - DNA, 21 bp, Artificial Sequence
  source: /note="Description of Combined DNA/RNA Molecule: Synthetic oligonucleotide"
  source: /note="Description of Artificial Sequence: Synthetic oligonucleotide"
gaugaagaccuguuuugcctt

SEQ ID NO: 504 - DNA, 21 bp, Artificial Sequence
  source: /note="Description of Combined DNA/RNA Molecule: Synthetic oligonucleotide"
  source: /note="Description of Artificial Sequence: Synthetic oligonucleotide"
ggcaaaacaggucuucauctt

SEQ ID NO: 505 - DNA, 21 bp, Artificial Sequence
  source: /note="Description of Combined DNA/RNA Molecule: Synthetic oligonucleotide"
  source: /note="Description of Artificial Sequence: Synthetic oligonucleotide"
gaugaagaccuguuuugcctt

SEQ ID NO: 506 - DNA, 21 bp, Artificial Sequence
  source: /note="Description of Combined DNA/RNA Molecule: Synthetic oligonucleotide"
  source: /note="Description of Artificial Sequence: Synthetic oligonucleotide"
ggcaaaacaggucuucauctt

SEQ ID NO: 507 - DNA, 21 bp, Artificial Sequence
  source: /note="Description of Combined DNA/RNA Molecule: Synthetic oligonucleotide"
  source: /note="Description of Artificial Sequence: Synthetic oligonucleotide"
gggaugaagaccuguuuugtt

SEQ ID NO: 508 - DNA, 21 bp, Artificial Sequence
  source: /note="Description of Combined DNA/RNA Molecule: Synthetic oligonucleotide"
  source: /note="Description of Artificial Sequence: Synthetic oligonucleotide"
caaaacaggucuucauccctt

SEQ ID NO: 509 - DNA, 21 bp, Artificial Sequence
  source: /note="Description of Combined DNA/RNA Molecule: Synthetic oligonucleotide"
  source: /note="Description of Artificial Sequence: Synthetic oligonucleotide"
gggaugaagaccuguuuugtt

SEQ ID NO: 510 - DNA, 21 bp, Artificial Sequence
  source: /note="Description of Combined DNA/RNA Molecule: Synthetic oligonucleotide"
  source: /note="Description of Artificial Sequence: Synthetic oligonucleotide"
caaaacaggucuucauccctt

SEQ ID NO: 511 - DNA, 21 bp, Artificial Sequence
  source: /note="Description of Combined DNA/RNA Molecule: Synthetic oligonucleotide"
  source: /note="Description of Artificial Sequence: Synthetic oligonucleotide"
gggaugaagaccuguuuugtt

SEQ ID NO: 512 - DNA, 21 bp, Artificial Sequence
  source: /note="Description of Combined DNA/RNA Molecule: Synthetic oligonucleotide"
  source: /note="Description of Artificial Sequence: Synthetic oligonucleotide"
caaaacaggucuucauccctt

SEQ ID NO: 513 - DNA, 21 bp, Artificial Sequence
  source: /note="Description of Combined DNA/RNA Molecule: Synthetic oligonucleotide"
  source: /note="Description of Artificial Sequence: Synthetic oligonucleotide"
gggaugaagaccuguuuugtt

SEQ ID NO: 514 - DNA, 21 bp, Artificial Sequence
  source: /note="Description of Combined DNA/RNA Molecule: Synthetic oligonucleotide"
  source: /note="Description of Artificial Sequence: Synthetic oligonucleotide"
caaaacaggucuucauccctt

SEQ ID NO: 515 - DNA, 21 bp, Artificial Sequence
  source: /note="Description of Combined DNA/RNA Molecule: Synthetic oligonucleotide"
  source: /note="Description of Artificial Sequence: Synthetic oligonucleotide"
cuuauaagaggaggaguagtt

SEQ ID NO: 516 - DNA, 21 bp, Artificial Sequence
  source: /note="Description of Combined DNA/RNA Molecule: Synthetic oligonucleotide"
  source: /note="Description of Artificial Sequence: Synthetic oligonucleotide"
cuacuccuccucuuauaagtt

SEQ ID NO: 517 - DNA, 21 bp, Artificial Sequence
  source: /note="Description of Combined DNA/RNA Molecule: Synthetic oligonucleotide"
  source: /note="Description of Artificial Sequence: Synthetic oligonucleotide"
caugcuuccuuguuacagutt

SEQ ID NO: 518 - DNA, 21 bp, Artificial Sequence
  source: /note="Description of Combined DNA/RNA Molecule: Synthetic oligonucleotide"
  source: /note="Description of Artificial Sequence: Synthetic oligonucleotide"
acuguaacaaggaagcaugtt

SEQ ID NO: 519 - DNA, 21 bp, Artificial Sequence
  source: /note="Description of Combined DNA/RNA Molecule: Synthetic oligonucleotide"
  source: /note="Description of Artificial Sequence: Synthetic oligonucleotide"
uacgggacuguaacaccugtt

SEQ ID NO: 520 - DNA, 21 bp, Artificial Sequence
  source: /note="Description of Combined DNA/RNA Molecule: Synthetic oligonucleotide"
  source: /note="Description of Artificial Sequence: Synthetic oligonucleotide"
cagguguuacagucccguatt

SEQ ID NO: 521 - DNA, 21 bp, Artificial Sequence
  source: /note="Description of Combined DNA/RNA Molecule: Synthetic oligonucleotide"
  source: /note="Description of Artificial Sequence: Synthetic oligonucleotide"
ugcuuccuuguuacagugutt

SEQ ID NO: 522 - DNA, 21 bp, Artificial Sequence
  source: /note="Description of Combined DNA/RNA Molecule: Synthetic oligonucleotide"
  source: /note="Description of Artificial Sequence: Synthetic oligonucleotide"
acacuguaacaaggaagcatt

SEQ ID NO: 523 - DNA, 21 bp, Artificial Sequence
  source: /note="Description of Combined DNA/RNA Molecule: Synthetic oligonucleotide"
  source: /note="Description of Artificial Sequence: Synthetic oligonucleotide"
ccuguugaauguuggguuctt

SEQ ID NO: 524 - DNA, 21 bp, Artificial Sequence
  source: /note="Description of Combined DNA/RNA Molecule: Synthetic oligonucleotide"
  source: /note="Description of Artificial Sequence: Synthetic oligonucleotide"
gaacccaacauucaacaggtt

SEQ ID NO: 525 - DNA, 21 bp, Artificial Sequence
  source: /note="Description of Combined DNA/RNA Molecule: Synthetic oligonucleotide"
  source: /note="Description of Artificial Sequence: Synthetic oligonucleotide"
guugaauguuggguuccugtt

SEQ ID NO: 526 - DNA, 21 bp, Artificial Sequence
  source: /note="Description of Combined DNA/RNA Molecule: Synthetic oligonucleotide"
  source: /note="Description of Artificial Sequence: Synthetic oligonucleotide"
caggaacccaacauucaactt

SEQ ID NO: 527 - DNA, 21 bp, Artificial Sequence
  source: /note="Description of Combined DNA/RNA Molecule: Synthetic oligonucleotide"
  source: /note="Description of Artificial Sequence: Synthetic oligonucleotide"
aauguuggguuccugaucctt

SEQ ID NO: 528 - DNA, 21 bp, Artificial Sequence
  source: /note="Description of Combined DNA/RNA Molecule: Synthetic oligonucleotide"
  source: /note="Description of Artificial Sequence: Synthetic oligonucleotide"
ggaucaggaacccaacauutt

SEQ ID NO: 529 - DNA, 21 bp, Artificial Sequence
  source: /note="Description of Combined DNA/RNA Molecule: Synthetic oligonucleotide"
  source: /note="Description of Artificial Sequence: Synthetic oligonucleotide"
acacuaacaggaggagaaatt

SEQ ID NO: 530 - DNA, 21 bp, Artificial Sequence
  source: /note="Description of Combined DNA/RNA Molecule: Synthetic oligonucleotide"
  source: /note="Description of Artificial Sequence: Synthetic oligonucleotide"
uuucuccuccuguuagugutt

SEQ ID NO: 531 - DNA, 21 bp, Artificial Sequence
  source: /note="Description of Combined DNA/RNA Molecule: Synthetic oligonucleotide"
  source: /note="Description of Artificial Sequence: Synthetic oligonucleotide"
uauaagaggaggaguagaatt

SEQ ID NO: 532 - DNA, 21 bp, Artificial Sequence
  source: /note="Description of Combined DNA/RNA Molecule: Synthetic oligonucleotide"
  source: /note="Description of Artificial Sequence: Synthetic oligonucleotide"
uucuacuccuccucuuauatt

SEQ ID NO: 533 - DNA, 21 bp, Artificial Sequence
  source: /note="Description of Combined DNA/RNA Molecule: Synthetic oligonucleotide"
  source: /note="Description of Artificial Sequence: Synthetic oligonucleotide"
auaagaggaggaguagaagtt

SEQ ID NO: 534 - DNA, 21 bp, Artificial Sequence
  source: /note="Description of Combined DNA/RNA Molecule: Synthetic oligonucleotide"
  source: /note="Description of Artificial Sequence: Synthetic oligonucleotide"
cuucuacuccuccucuuautt

SEQ ID NO: 535 - DNA, 21 bp, Artificial Sequence
  source: /note="Description of Combined DNA/RNA Molecule: Synthetic oligonucleotide"
  source: /note="Description of Artificial Sequence: Synthetic oligonucleotide"
acuguaacaccugcucuugtt

SEQ ID NO: 536 - DNA, 21 bp, Artificial Sequence
  source: /note="Description of Combined DNA/RNA Molecule: Synthetic oligonucleotide"
  source: /note="Description of Artificial Sequence: Synthetic oligonucleotide"
caagagcagguguuacagutt

SEQ ID NO: 537 - DNA, 21 bp, Artificial Sequence
  source: /note="Description of Combined DNA/RNA Molecule: Synthetic oligonucleotide"
  source: /note="Description of Artificial Sequence: Synthetic oligonucleotide"
ggacaugcuuccuuguuactt

SEQ ID NO: 538 - DNA, 21 bp, Artificial Sequence
  source: /note="Description of Combined DNA/RNA Molecule: Synthetic oligonucleotide"
  source: /note="Description of Artificial Sequence: Synthetic oligonucleotide"
guaacaaggaagcaugucctt

SEQ ID NO: 539 - DNA, 21 bp, Artificial Sequence
  source: /note="Description of Combined DNA/RNA Molecule: Synthetic oligonucleotide"
  source: /note="Description of Artificial Sequence: Synthetic oligonucleotide"
acaugcuuccuuguuacagtt

SEQ ID NO: 540 - DNA, 21 bp, Artificial Sequence
  source: /note="Description of Combined DNA/RNA Molecule: Synthetic oligonucleotide"
  source: /note="Description of Artificial Sequence: Synthetic oligonucleotide"
cuguaacaaggaagcaugutt

SEQ ID NO: 541 - DNA, 21 bp, Artificial Sequence
  source: /note="Description of Combined DNA/RNA Molecule: Synthetic oligonucleotide"
  source: /note="Description of Artificial Sequence: Synthetic oligonucleotide"
augcuuccuuguuacagugtt

SEQ ID NO: 542 - DNA, 21 bp, Artificial Sequence
  source: /note="Description of Combined DNA/RNA Molecule: Synthetic oligonucleotide"
  source: /note="Description of Artificial Sequence: Synthetic oligonucleotide"
cacuguaacaaggaagcautt

SEQ ID NO: 543 - DNA, 21 bp, Artificial Sequence
  source: /note="Description of Combined DNA/RNA Molecule: Synthetic oligonucleotide"
  source: /note="Description of Artificial Sequence: Synthetic oligonucleotide"
cuguugaauguuggguucctt

SEQ ID NO: 544 - DNA, 21 bp, Artificial Sequence
  source: /note="Description of Combined DNA/RNA Molecule: Synthetic oligonucleotide"
  source: /note="Description of Artificial Sequence: Synthetic oligonucleotide"
ggaacccaacauucaacagtt

SEQ ID NO: 545 - DNA, 21 bp, Artificial Sequence
  source: /note="Description of Combined DNA/RNA Molecule: Synthetic oligonucleotide"
  source: /note="Description of Artificial Sequence: Synthetic oligonucleotide"
gaauguuggguuccugauctt

SEQ ID NO: 546 - DNA, 21 bp, Artificial Sequence
  source: /note="Description of Combined DNA/RNA Molecule: Synthetic oligonucleotide"
  source: /note="Description of Artificial Sequence: Synthetic oligonucleotide"
gaucaggaacccaacauuctt

SEQ ID NO: 547 - DNA, 21 bp, Artificial Sequence
  source: /note="Description of Combined DNA/RNA Molecule: Synthetic oligonucleotide"
  source: /note="Description of Artificial Sequence: Synthetic oligonucleotide"
cgggacuguaacaccugcutt

SEQ ID NO: 548 - DNA, 21 bp, Artificial Sequence
  source: /note="Description of Combined DNA/RNA Molecule: Synthetic oligonucleotide"
  source: /note="Description of Artificial Sequence: Synthetic oligonucleotide"
agcagguguuacagucccgtt

SEQ ID NO: 549 - DNA, 21 bp, Artificial Sequence
  source: /note="Description of Combined DNA/RNA Molecule: Synthetic oligonucleotide"
  source: /note="Description of Artificial Sequence: Synthetic oligonucleotide"
ggacuguaacaccugcucutt

SEQ ID NO: 550 - DNA, 21 bp, Artificial Sequence
  source: /note="Description of Combined DNA/RNA Molecule: Synthetic oligonucleotide"
  source: /note="Description of Artificial Sequence: Synthetic oligonucleotide"
agagcagguguuacagucctt

SEQ ID NO: 551 - DNA, 21 bp, Artificial Sequence
  source: /note="Description of Combined DNA/RNA Molecule: Synthetic oligonucleotide"
  source: /note="Description of Artificial Sequence: Synthetic oligonucleotide"
gacuguaacaccugcucuutt

SEQ ID NO: 552 - DNA, 21 bp, Artificial Sequence
  source: /note="Description of Combined DNA/RNA Molecule: Synthetic oligonucleotide"
  source: /note="Description of Artificial Sequence: Synthetic oligonucleotide"
aagagcagguguuacaguctt

SEQ ID NO: 553 - DNA, 21 bp, Artificial Sequence
  source: /note="Description of Combined DNA/RNA Molecule: Synthetic oligonucleotide"
  source: /note="Description of Artificial Sequence: Synthetic oligonucleotide"
cuccagaaaugggugaccctt

SEQ ID NO: 554 - DNA, 21 bp, Artificial Sequence
  source: /note="Description of Combined DNA/RNA Molecule: Synthetic oligonucleotide"
  source: /note="Description of Artificial Sequence: Synthetic oligonucleotide"
gggucacccauuucuggagtt

SEQ ID NO: 555 - DNA, 21 bp, Artificial Sequence
  source: /note="Description of Combined DNA/RNA Molecule: Synthetic oligonucleotide"
  source: /note="Description of Artificial Sequence: Synthetic oligonucleotide"
uaagaggaggaguagaagutt

SEQ ID NO: 556 - DNA, 21 bp, Artificial Sequence
  source: /note="Description of Combined DNA/RNA Molecule: Synthetic oligonucleotide"
  source: /note="Description of Artificial Sequence: Synthetic oligonucleotide"
acuucuacuccuccucuuatt

SEQ ID NO: 557 - DNA, 21 bp, Artificial Sequence
  source: /note="Description of Combined DNA/RNA Molecule: Synthetic oligonucleotide"
  source: /note="Description of Artificial Sequence: Synthetic oligonucleotide"
gaggcugcugcuacuauagtt

SEQ ID NO: 558 - DNA, 21 bp, Artificial Sequence
  source: /note="Description of Combined DNA/RNA Molecule: Synthetic oligonucleotide"
  source: /note="Description of Artificial Sequence: Synthetic oligonucleotide"
cuauaguagcagcagccuctt

SEQ ID NO: 559 - DNA, 21 bp, Artificial Sequence
  source: /note="Description of Combined DNA/RNA Molecule: Synthetic oligonucleotide"
  source: /note="Description of Artificial Sequence: Synthetic oligonucleotide"
auugcaucccuugcuacugtt

SEQ ID NO: 560 - DNA, 21 bp, Artificial Sequence
  source: /note="Description of Combined DNA/RNA Molecule: Synthetic oligonucleotide"
  source: /note="Description of Artificial Sequence: Synthetic oligonucleotide"
caguagcaagggaugcaautt

SEQ ID NO: 561 - DNA, 21 bp, Artificial Sequence
  source: /note="Description of Combined DNA/RNA Molecule: Synthetic oligonucleotide"
  source: /note="Description of Artificial Sequence: Synthetic oligonucleotide"
ugcaucccuugcuacuguatt

SEQ ID NO: 562 - DNA, 21 bp, Artificial Sequence
  source: /note="Description of Combined DNA/RNA Molecule: Synthetic oligonucleotide"
  source: /note="Description of Artificial Sequence: Synthetic oligonucleotide"
uacaguagcaagggaugcatt

SEQ ID NO: 563 - DNA, 21 bp, Artificial Sequence
  source: /note="Description of Combined DNA/RNA Molecule: Synthetic oligonucleotide"
  source: /note="Description of Artificial Sequence: Synthetic oligonucleotide"
uuguguuuucagguucaugtt

SEQ ID NO: 564 - DNA, 21 bp, Artificial Sequence
  source: /note="Description of Combined DNA/RNA Molecule: Synthetic oligonucleotide"
  source: /note="Description of Artificial Sequence: Synthetic oligonucleotide"
caugaaccugaaaacacaatt

SEQ ID NO: 565 - DNA, 21 bp, Artificial Sequence
  source: /note="Description of Combined DNA/RNA Molecule: Synthetic oligonucleotide"
  source: /note="Description of Artificial Sequence: Synthetic oligonucleotide"
ggaccuaguugcuacuguutt

SEQ ID NO: 566 - DNA, 21 bp, Artificial Sequence
  source: /note="Description of Combined DNA/RNA Molecule: Synthetic oligonucleotide"
  source: /note="Description of Artificial Sequence: Synthetic oligonucleotide"
aacaguagcaacuaggucctt

SEQ ID NO: 567 - DNA, 21 bp, Artificial Sequence
  source: /note="Description of Combined DNA/RNA Molecule: Synthetic oligonucleotide"
  source: /note="Description of Artificial Sequence: Synthetic oligonucleotide"
cugccacaggauuuucagutt

SEQ ID NO: 568 - DNA, 21 bp, Artificial Sequence
  source: /note="Description of Combined DNA/RNA Molecule: Synthetic oligonucleotide"
  source: /note="Description of Artificial Sequence: Synthetic oligonucleotide"
acugaaaauccuguggcagtt

SEQ ID NO: 569 - DNA, 21 bp, Artificial Sequence
  source: /note="Description of Combined DNA/RNA Molecule: Synthetic oligonucleotide"
  source: /note="Description of Artificial Sequence: Synthetic oligonucleotide"
gcuacuauagaaguugaaatt

SEQ ID NO: 570 - DNA, 21 bp, Artificial Sequence
  source: /note="Description of Combined DNA/RNA Molecule: Synthetic oligonucleotide"
  source: /note="Description of Artificial Sequence: Synthetic oligonucleotide"
uuucaacuucuauaguagctt

SEQ ID NO: 571 - DNA, 21 bp, Artificial Sequence
  source: /note="Description of Combined DNA/RNA Molecule: Synthetic oligonucleotide"
  source: /note="Description of Artificial Sequence: Synthetic oligonucleotide"
aauugcaucccuugcuacutt

SEQ ID NO: 572 - DNA, 21 bp, Artificial Sequence
  source: /note="Description of Combined DNA/RNA Molecule: Synthetic oligonucleotide"
  source: /note="Description of Artificial Sequence: Synthetic oligonucleotide"
aguagcaagggaugcaauutt

SEQ ID NO: 573 - DNA, 21 bp, Artificial Sequence
  source: /note="Description of Combined DNA/RNA Molecule: Synthetic oligonucleotide"
  source: /note="Description of Artificial Sequence: Synthetic oligonucleotide"
accuaguugcuacuguuuctt

SEQ ID NO: 574 - DNA, 21 bp, Artificial Sequence
  source: /note="Description of Combined DNA/RNA Molecule: Synthetic oligonucleotide"
  source: /note="Description of Artificial Sequence: Synthetic oligonucleotide"
gaaacaguagcaacuaggutt

SEQ ID NO: 575 - DNA, 21 bp, Artificial Sequence
  source: /note="Description of Combined DNA/RNA Molecule: Synthetic oligonucleotide"
  source: /note="Description of Artificial Sequence: Synthetic oligonucleotide"
cuacuauagaaguugaaautt

SEQ ID NO: 576 - DNA, 21 bp, Artificial Sequence
  source: /note="Description of Combined DNA/RNA Molecule: Synthetic oligonucleotide"
  source: /note="Description of Artificial Sequence: Synthetic oligonucleotide"
auuucaacuucuauaguagtt

SEQ ID NO: 577 - DNA, 21 bp, Artificial Sequence
  source: /note="Description of Combined DNA/RNA Molecule: Synthetic oligonucleotide"
  source: /note="Description of Artificial Sequence: Synthetic oligonucleotide"
aggccuuacuccugaaacatt

SEQ ID NO: 578 - DNA, 21 bp, Artificial Sequence
  source: /note="Description of Combined DNA/RNA Molecule: Synthetic oligonucleotide"
  source: /note="Description of Artificial Sequence: Synthetic oligonucleotide"
uguuucaggaguaaggccutt

SEQ ID NO: 579 - DNA, 21 bp, Artificial Sequence
  source: /note="Description of Combined DNA/RNA Molecule: Synthetic oligonucleotide"
  source: /note="Description of Artificial Sequence: Synthetic oligonucleotide"
ggccuuacuccugaaacautt

SEQ ID NO: 580 - DNA, 21 bp, Artificial Sequence
  source: /note="Description of Combined DNA/RNA Molecule: Synthetic oligonucleotide"
  source: /note="Description of Artificial Sequence: Synthetic oligonucleotide"
auguuucaggaguaaggcctt

SEQ ID NO: 581 - DNA, 21 bp, Artificial Sequence
  source: /note="Description of Combined DNA/RNA Molecule: Synthetic oligonucleotide"
  source: /note="Description of Artificial Sequence: Synthetic oligonucleotide"
guaaaaccuggaguggaactt

SEQ ID NO: 582 - DNA, 21 bp, Artificial Sequence
  source: /note="Description of Combined DNA/RNA Molecule: Synthetic oligonucleotide"
  source: /note="Description of Artificial Sequence: Synthetic oligonucleotide"
guuccacuccagguuuuactt

SEQ ID NO: 583 - DNA, 21 bp, Artificial Sequence
  source: /note="Description of Combined DNA/RNA Molecule: Synthetic oligonucleotide"
  source: /note="Description of Artificial Sequence: Synthetic oligonucleotide"
uguguuuucagguucauggtt

SEQ ID NO: 584 - DNA, 21 bp, Artificial Sequence
  source: /note="Description of Combined DNA/RNA Molecule: Synthetic oligonucleotide"
  source: /note="Description of Artificial Sequence: Synthetic oligonucleotide"
ccaugaaccugaaaacacatt

SEQ ID NO: 585 - DNA, 21 bp, Artificial Sequence
  source: /note="Description of Combined DNA/RNA Molecule: Synthetic oligonucleotide"
  source: /note="Description of Artificial Sequence: Synthetic oligonucleotide"
uguuuucagguucaugggutt

SEQ ID NO: 586 - DNA, 21 bp, Artificial Sequence
  source: /note="Description of Combined DNA/RNA Molecule: Synthetic oligonucleotide"
  source: /note="Description of Artificial Sequence: Synthetic oligonucleotide"
acccaugaaccugaaaacatt

SEQ ID NO: 587 - DNA, 21 bp, Artificial Sequence
  source: /note="Description of Combined DNA/RNA Molecule: Synthetic oligonucleotide"
  source: /note="Description of Artificial Sequence: Synthetic oligonucleotide"
aucccuugcuacuguagagtt

SEQ ID NO: 588 - DNA, 21 bp, Artificial Sequence
  source: /note="Description of Combined DNA/RNA Molecule: Synthetic oligonucleotide"
  source: /note="Description of Artificial Sequence: Synthetic oligonucleotide"
cucuacaguagcaagggautt

SEQ ID NO: 589 - DNA, 21 bp, Artificial Sequence
  source: /note="Description of Combined DNA/RNA Molecule: Synthetic oligonucleotide"
  source: /note="Description of Artificial Sequence: Synthetic oligonucleotide"
gaccuaguugcuacuguuutt

SEQ ID NO: 590 - DNA, 21 bp, Artificial Sequence
  source: /note="Description of Combined DNA/RNA Molecule: Synthetic oligonucleotide"
  source: /note="Description of Artificial Sequence: Synthetic oligonucleotide"
aaacaguagcaacuagguctt

SEQ ID NO: 591 - DNA, 21 bp, Artificial Sequence
  source: /note="Description of Combined DNA/RNA Molecule: Synthetic oligonucleotide"
  source: /note="Description of Artificial Sequence: Synthetic oligonucleotide"
ggauuacaaguaccucugatt

SEQ ID NO: 592 - DNA, 21 bp, Artificial Sequence
  source: /note="Description of Combined DNA/RNA Molecule: Synthetic oligonucleotide"
  source: /note="Description of Artificial Sequence: Synthetic oligonucleotide"
ucagagguacuuguaaucctt

SEQ ID NO: 593 - DNA, 21 bp, Artificial Sequence
  source: /note="Description of Combined DNA/RNA Molecule: Synthetic oligonucleotide"
  source: /note="Description of Artificial Sequence: Synthetic oligonucleotide"
uaggccuuacuccugaaactt

SEQ ID NO: 594 - DNA, 21 bp, Artificial Sequence
  source: /note="Description of Combined DNA/RNA Molecule: Synthetic oligonucleotide"
  source: /note="Description of Artificial Sequence: Synthetic oligonucleotide"
guuucaggaguaaggccuatt

SEQ ID NO: 595 - DNA, 21 bp, Artificial Sequence
  source: /note="Description of Combined DNA/RNA Molecule: Synthetic oligonucleotide"
  source: /note="Description of Artificial Sequence: Synthetic oligonucleotide"
uguuagaauuuuugcuggatt

SEQ ID NO: 596 - DNA, 21 bp, Artificial Sequence
  source: /note="Description of Combined DNA/RNA Molecule: Synthetic oligonucleotide"
  source: /note="Description of Artificial Sequence: Synthetic oligonucleotide"
uccagcaaaaauucuaacatt

SEQ ID NO: 597 - DNA, 21 bp, Artificial Sequence
  source: /note="Description of Combined DNA/RNA Molecule: Synthetic oligonucleotide"
  source: /note="Description of Artificial Sequence: Synthetic oligonucleotide"
ugcugccacaggauuuucatt

SEQ ID NO: 598 - DNA, 21 bp, Artificial Sequence
  source: /note="Description of Combined DNA/RNA Molecule: Synthetic oligonucleotide"
  source: /note="Description of Artificial Sequence: Synthetic oligonucleotide"
ugaaaauccuguggcagcatt

SEQ ID NO: 599 - DNA, 21 bp, Artificial Sequence
  source: /note="Description of Combined DNA/RNA Molecule: Synthetic oligonucleotide"
  source: /note="Description of Artificial Sequence: Synthetic oligonucleotide"
ccacaggauuuucaguagctt

SEQ ID NO: 600 - DNA, 21 bp, Artificial Sequence
  source: /note="Description of Combined DNA/RNA Molecule: Synthetic oligonucleotide"
  source: /note="Description of Artificial Sequence: Synthetic oligonucleotide"
gcuacugaaaauccuguggtt

SEQ ID NO: 601 - DNA, 21 bp, Artificial Sequence
  source: /note="Description of Combined DNA/RNA Molecule: Synthetic oligonucleotide"
  source: /note="Description of Artificial Sequence: Synthetic oligonucleotide"
aaguugaaauugcaucccutt

SEQ ID NO: 602 - DNA, 21 bp, Artificial Sequence
  source: /note="Description of Combined DNA/RNA Molecule: Synthetic oligonucleotide"
  source: /note="Description of Artificial Sequence: Synthetic oligonucleotide"
agggaugcaauuucaacuutt

SEQ ID NO: 603 - DNA, 21 bp, Artificial Sequence
  source: /note="Description of Combined DNA/RNA Molecule: Synthetic oligonucleotide"
  source: /note="Description of Artificial Sequence: Synthetic oligonucleotide"
aguugaaauugcaucccuutt

SEQ ID NO: 604 - DNA, 21 bp, Artificial Sequence
  source: /note="Description of Combined DNA/RNA Molecule: Synthetic oligonucleotide"
  source: /note="Description of Artificial Sequence: Synthetic oligonucleotide"
aagggaugcaauuucaacutt

SEQ ID NO: 605 - DNA, 21 bp, Artificial Sequence
  source: /note="Description of Combined DNA/RNA Molecule: Synthetic oligonucleotide"
  source: /note="Description of Artificial Sequence: Synthetic oligonucleotide"
gcugcugccacaggauuuutt

SEQ ID NO: 606 - DNA, 21 bp, Artificial Sequence
  source: /note="Description of Combined DNA/RNA Molecule: Synthetic oligonucleotide"
  source: /note="Description of Artificial Sequence: Synthetic oligonucleotide"
aaaauccuguggcagcagctt

SEQ ID NO: 607 - DNA, 21 bp, Artificial Sequence
  source: /note="Description of Combined DNA/RNA Molecule: Synthetic oligonucleotide"
  source: /note="Description of Artificial Sequence: Synthetic oligonucleotide"
aguaaaaccuggaguggaatt

SEQ ID NO: 608 - DNA, 21 bp, Artificial Sequence
  source: /note="Description of Combined DNA/RNA Molecule: Synthetic oligonucleotide"
  source: /note="Description of Artificial Sequence: Synthetic oligonucleotide"
uuccacuccagguuuuacutt

SEQ ID NO: 609 - DNA, 21 bp, Artificial Sequence
  source: /note="Description of Combined DNA/RNA Molecule: Synthetic oligonucleotide"
  source: /note="Description of Artificial Sequence: Synthetic oligonucleotide"
uuuuguguuuucagguucatt

SEQ ID NO: 610 - DNA, 21 bp, Artificial Sequence
  source: /note="Description of Combined DNA/RNA Molecule: Synthetic oligonucleotide"
  source: /note="Description of Artificial Sequence: Synthetic oligonucleotide"
ugaaccugaaaacacaaaatt

SEQ ID NO: 611 - DNA, 21 bp, Artificial Sequence
  source: /note="Description of Combined DNA/RNA Molecule: Synthetic oligonucleotide"
  source: /note="Description of Artificial Sequence: Synthetic oligonucleotide"
uuuguguuuucagguucautt

SEQ ID NO: 612 - DNA, 21 bp, Artificial Sequence
  source: /note="Description of Combined DNA/RNA Molecule: Synthetic oligonucleotide"
  source: /note="Description of Artificial Sequence: Synthetic oligonucleotide"
augaaccugaaaacacaaatt

SEQ ID NO: 613 - DNA, 21 bp, Artificial Sequence
  source: /note="Description of Combined DNA/RNA Molecule: Synthetic oligonucleotide"
  source: /note="Description of Artificial Sequence: Synthetic oligonucleotide"
guguuuucagguucaugggtt

SEQ ID NO: 614 - DNA, 21 bp, Artificial Sequence
  source: /note="Description of Combined DNA/RNA Molecule: Synthetic oligonucleotide"
  source: /note="Description of Artificial Sequence: Synthetic oligonucleotide"
cccaugaaccugaaaacactt

SEQ ID NO: 615 - DNA, 21 bp, Artificial Sequence
  source: /note="Description of Combined DNA/RNA Molecule: Synthetic oligonucleotide"
  source: /note="Description of Artificial Sequence: Synthetic oligonucleotide"
guuuucagguucaugggugtt

SEQ ID NO: 616 - DNA, 21 bp, Artificial Sequence
  source: /note="Description of Combined DNA/RNA Molecule: Synthetic oligonucleotide"
  source: /note="Description of Artificial Sequence: Synthetic oligonucleotide"
cacccaugaaccugaaaactt

SEQ ID NO: 617 - DNA, 21 bp, Artificial Sequence
  source: /note="Description of Combined DNA/RNA Molecule: Synthetic oligonucleotide"
  source: /note="Description of Artificial Sequence: Synthetic oligonucleotide"
uuuucagguucaugggugctt

SEQ ID NO: 618 - DNA, 21 bp, Artificial Sequence
  source: /note="Description of Combined DNA/RNA Molecule: Synthetic oligonucleotide"
  source: /note="Description of Artificial Sequence: Synthetic oligonucleotide"
gcacccaugaaccugaaaatt

SEQ ID NO: 619 - DNA, 21 bp, Artificial Sequence
  source: /note="Description of Combined DNA/RNA Molecule: Synthetic oligonucleotide"
  source: /note="Description of Artificial Sequence: Synthetic oligonucleotide"
uuucagguucaugggugcctt

SEQ ID NO: 620 - DNA, 21 bp, Artificial Sequence
  source: /note="Description of Combined DNA/RNA Molecule: Synthetic oligonucleotide"
  source: /note="Description of Artificial Sequence: Synthetic oligonucleotide"
ggcacccaugaaccugaaatt

SEQ ID NO: 621 - DNA, 21 bp, Artificial Sequence
  source: /note="Description of Combined DNA/RNA Molecule: Synthetic oligonucleotide"
  source: /note="Description of Artificial Sequence: Synthetic oligonucleotide"
aauugcugcuggagaggcutt

SEQ ID NO: 622 - DNA, 21 bp, Artificial Sequence
  source: /note="Description of Combined DNA/RNA Molecule: Synthetic oligonucleotide"
  source: /note="Description of Artificial Sequence: Synthetic oligonucleotide"
agccucuccagcagcaauutt

SEQ ID NO: 623 - DNA, 21 bp, Artificial Sequence
  source: /note="Description of Combined DNA/RNA Molecule: Synthetic oligonucleotide"
  source: /note="Description of Artificial Sequence: Synthetic oligonucleotide"
uugcaucccuugcuacugutt

SEQ ID NO: 624 - DNA, 21 bp, Artificial Sequence
  source: /note="Description of Combined DNA/RNA Molecule: Synthetic oligonucleotide"
  source: /note="Description of Artificial Sequence: Synthetic oligonucleotide"
acaguagcaagggaugcaatt

SEQ ID NO: 625 - DNA, 21 bp, Artificial Sequence
  source: /note="Description of Combined DNA/RNA Molecule: Synthetic oligonucleotide"
  source: /note="Description of Artificial Sequence: Synthetic oligonucleotide"
gcuguagcuggguuugcugtt

SEQ ID NO: 626 - DNA, 21 bp, Artificial Sequence
  source: /note="Description of Combined DNA/RNA Molecule: Synthetic oligonucleotide"
  source: /note="Description of Artificial Sequence: Synthetic oligonucleotide"
cagcaaacccagcuacagctt

SEQ ID NO: 627 - DNA, 21 bp, Artificial Sequence
  source: /note="Description of Combined DNA/RNA Molecule: Synthetic oligonucleotide"
  source: /note="Description of Artificial Sequence: Synthetic oligonucleotide"
uagaaguugaaauugcauctt

SEQ ID NO: 628 - DNA, 21 bp, Artificial Sequence
  source: /note="Description of Combined DNA/RNA Molecule: Synthetic oligonucleotide"
  source: /note="Description of Artificial Sequence: Synthetic oligonucleotide"
gaugcaauuucaacuucuatt

SEQ ID NO: 629 - DNA, 21 bp, Artificial Sequence
  source: /note="Description of Combined DNA/RNA Molecule: Synthetic oligonucleotide"
  source: /note="Description of Artificial Sequence: Synthetic oligonucleotide"
gaaguugaaauugcauccctt

SEQ ID NO: 630 - DNA, 21 bp, Artificial Sequence
  source: /note="Description of Combined DNA/RNA Molecule: Synthetic oligonucleotide"
  source: /note="Description of Artificial Sequence: Synthetic oligonucleotide"
gggaugcaauuucaacuuctt

SEQ ID NO: 631 - DNA, 21 bp, Artificial Sequence
  source: /note="Description of Combined DNA/RNA Molecule: Synthetic oligonucleotide"
  source: /note="Description of Artificial Sequence: Synthetic oligonucleotide"
caucccuugcuacuguagatt

SEQ ID NO: 632 - DNA, 21 bp, Artificial Sequence
  source: /note="Description of Combined DNA/RNA Molecule: Synthetic oligonucleotide"
  source: /note="Description of Artificial Sequence: Synthetic oligonucleotide"
ucuacaguagcaagggaugtt

SEQ ID NO: 633 - DNA, 21 bp, Artificial Sequence
  source: /note="Description of Combined DNA/RNA Molecule: Synthetic oligonucleotide"
  source: /note="Description of Artificial Sequence: Synthetic oligonucleotide"
uaguaaaaccuggaguggatt

SEQ ID NO: 634 - DNA, 21 bp, Artificial Sequence
  source: /note="Description of Combined DNA/RNA Molecule: Synthetic oligonucleotide"
  source: /note="Description of Artificial Sequence: Synthetic oligonucleotide"
uccacuccagguuuuacuatt

SEQ ID NO: 635 - DNA, 21 bp, Artificial Sequence
  source: /note="Description of Combined DNA/RNA Molecule: Synthetic oligonucleotide"
  source: /note="Description of Artificial Sequence: Synthetic oligonucleotide"
uuuuuuguuagaauuuuugtt

SEQ ID NO: 636 - DNA, 21 bp, Artificial Sequence
  source: /note="Description of Combined DNA/RNA Molecule: Synthetic oligonucleotide"
  source: /note="Description of Artificial Sequence: Synthetic oligonucleotide"
caaaaauucuaacaaaaaatt

SEQ ID NO: 637 - DNA, 21 bp, Artificial Sequence
  source: /note="Description of Combined DNA/RNA Molecule: Synthetic oligonucleotide"
  source: /note="Description of Artificial Sequence: Synthetic oligonucleotide"
uacuauagaaguugaaauutt

SEQ ID NO: 638 - DNA, 21 bp, Artificial Sequence
  source: /note="Description of Combined DNA/RNA Molecule: Synthetic oligonucleotide"
  source: /note="Description of Artificial Sequence: Synthetic oligonucleotide"
aauuucaacuucuauaguatt

SEQ ID NO: 639 - DNA, 21 bp, Artificial Sequence
  source: /note="Description of Combined DNA/RNA Molecule: Synthetic oligonucleotide"
  source: /note="Description of Artificial Sequence: Synthetic oligonucleotide"
ccuaguugcuacuguuucutt

SEQ ID NO: 640 - DNA, 21 bp, Artificial Sequence
  source: /note="Description of Combined DNA/RNA Molecule: Synthetic oligonucleotide"
  source: /note="Description of Artificial Sequence: Synthetic oligonucleotide"
agaaacaguagcaacuaggtt

SEQ ID NO: 641 - DNA, 21 bp, Artificial Sequence
  source: /note="Description of Combined DNA/RNA Molecule: Synthetic oligonucleotide"
  source: /note="Description of Artificial Sequence: Synthetic oligonucleotide"
cuaguugcuacuguuucugtt

SEQ ID NO: 642 - DNA, 21 bp, Artificial Sequence
  source: /note="Description of Combined DNA/RNA Molecule: Synthetic oligonucleotide"
  source: /note="Description of Artificial Sequence: Synthetic oligonucleotide"
cagaaacaguagcaacuagtt

SEQ ID NO: 643 - DNA, 21 bp, Artificial Sequence
  source: /note="Description of Combined DNA/RNA Molecule: Synthetic oligonucleotide"
  source: /note="Description of Artificial Sequence: Synthetic oligonucleotide"
guugcuacuguuucugaggtt

SEQ ID NO: 644 - DNA, 21 bp, Artificial Sequence
  source: /note="Description of Combined DNA/RNA Molecule: Synthetic oligonucleotide"
  source: /note="Description of Artificial Sequence: Synthetic oligonucleotide"
ccucagaaacaguagcaactt

SEQ ID NO: 645 - DNA, 21 bp, Artificial Sequence
  source: /note="Description of Combined DNA/RNA Molecule: Synthetic oligonucleotide"
  source: /note="Description of Artificial Sequence: Synthetic oligonucleotide"
uggagaggcugcugcuacutt

SEQ ID NO: 646 - DNA, 21 bp, Artificial Sequence
  source: /note="Description of Combined DNA/RNA Molecule: Synthetic oligonucleotide"
  source: /note="Description of Artificial Sequence: Synthetic oligonucleotide"
aguagcagcagccucuccatt

SEQ ID NO: 647 - DNA, 21 bp, Artificial Sequence
  source: /note="Description of Combined DNA/RNA Molecule: Synthetic oligonucleotide"
  source: /note="Description of Artificial Sequence: Synthetic oligonucleotide"
gagaggcugcugcuacuautt

SEQ ID NO: 648 - DNA, 21 bp, Artificial Sequence
  source: /note="Description of Combined DNA/RNA Molecule: Synthetic oligonucleotide"
  source: /note="Description of Artificial Sequence: Synthetic oligonucleotide"
auaguagcagcagccucuctt

SEQ ID NO: 649 - DNA, 21 bp, Artificial Sequence
  source: /note="Description of Combined DNA/RNA Molecule: Synthetic oligonucleotide"
  source: /note="Description of Artificial Sequence: Synthetic oligonucleotide"
agaggcugcugcuacuauatt

SEQ ID NO: 650 - DNA, 21 bp, Artificial Sequence
  source: /note="Description of Combined DNA/RNA Molecule: Synthetic oligonucleotide"
  source: /note="Description of Artificial Sequence: Synthetic oligonucleotide"
uauaguagcagcagccucutt

SEQ ID NO: 651 - DNA, 21 bp, Artificial Sequence
  source: /note="Description of Combined DNA/RNA Molecule: Synthetic oligonucleotide"
  source: /note="Description of Artificial Sequence: Synthetic oligonucleotide"
gcugcugcuacuauagaagtt

SEQ ID NO: 652 - DNA, 21 bp, Artificial Sequence
  source: /note="Description of Combined DNA/RNA Molecule: Synthetic oligonucleotide"
  source: /note="Description of Artificial Sequence: Synthetic oligonucleotide"
cuucuauaguagcagcagctt

SEQ ID NO: 653 - DNA, 21 bp, Artificial Sequence
  source: /note="Description of Combined DNA/RNA Molecule: Synthetic oligonucleotide"
  source: /note="Description of Artificial Sequence: Synthetic oligonucleotide"
uuuuuuguguuuucagguutt

SEQ ID NO: 654 - DNA, 21 bp, Artificial Sequence
  source: /note="Description of Combined DNA/RNA Molecule: Synthetic oligonucleotide"
  source: /note="Description of Artificial Sequence: Synthetic oligonucleotide"
aaccugaaaacacaaaaaatt

SEQ ID NO: 655 - DNA, 21 bp, Artificial Sequence
  source: /note="Description of Combined DNA/RNA Molecule: Synthetic oligonucleotide"
  source: /note="Description of Artificial Sequence: Synthetic oligonucleotide"
acuauagaaguugaaauugtt

SEQ ID NO: 656 - DNA, 21 bp, Artificial Sequence
  source: /note="Description of Combined DNA/RNA Molecule: Synthetic oligonucleotide"
  source: /note="Description of Artificial Sequence: Synthetic oligonucleotide"
caauuucaacuucuauagutt

SEQ ID NO: 657 - DNA, 21 bp, Artificial Sequence
  source: /note="Description of Combined DNA/RNA Molecule: Synthetic oligonucleotide"
  source: /note="Description of Artificial Sequence: Synthetic oligonucleotide"
uuaguaaaaccuggaguggtt

SEQ ID NO: 658 - DNA, 21 bp, Artificial Sequence
  source: /note="Description of Combined DNA/RNA Molecule: Synthetic oligonucleotide"
  source: /note="Description of Artificial Sequence: Synthetic oligonucleotide"
ccacuccagguuuuacuaatt

SEQ ID NO: 659 - DNA, 21 bp, Artificial Sequence
  source: /note="Description of Combined DNA/RNA Molecule: Synthetic oligonucleotide"
  source: /note="Description of Artificial Sequence: Synthetic oligonucleotide"
gccuuacuccugaaacauatt

SEQ ID NO: 660 - DNA, 21 bp, Artificial Sequence
  source: /note="Description of Combined DNA/RNA Molecule: Synthetic oligonucleotide"
  source: /note="Description of Artificial Sequence: Synthetic oligonucleotide"
uauguuucaggaguaaggctt

SEQ ID NO: 661 - DNA, 21 bp, Artificial Sequence
  source: /note="Description of Combined DNA/RNA Molecule: Synthetic oligonucleotide"
  source: /note="Description of Artificial Sequence: Synthetic oligonucleotide"
agaaguugaaauugcaucctt

SEQ ID NO: 662 - DNA, 21 bp, Artificial Sequence
  source: /note="Description of Combined DNA/RNA Molecule: Synthetic oligonucleotide"
  source: /note="Description of Artificial Sequence: Synthetic oligonucleotide"
ggaugcaauuucaacuucutt

SEQ ID NO: 663 - DNA, 21 bp, Artificial Sequence
  source: /note="Description of Combined DNA/RNA Molecule: Synthetic oligonucleotide"
  source: /note="Description of Artificial Sequence: Synthetic oligonucleotide"
ugccacaggauuuucaguatt

SEQ ID NO: 664 - DNA, 21 bp, Artificial Sequence
  source: /note="Description of Combined DNA/RNA Molecule: Synthetic oligonucleotide"
  source: /note="Description of Artificial Sequence: Synthetic oligonucleotide"
uacugaaaauccuguggcatt

SEQ ID NO: 665 - DNA, 21 bp, Artificial Sequence
  source: /note="Description of Combined DNA/RNA Molecule: Synthetic oligonucleotide"
  source: /note="Description of Artificial Sequence: Synthetic oligonucleotide"
gcugccacaggauuuucagtt

SEQ ID NO: 666 - DNA, 21 bp, Artificial Sequence
  source: /note="Description of Combined DNA/RNA Molecule: Synthetic oligonucleotide"
  source: /note="Description of Artificial Sequence: Synthetic oligonucleotide"
cugaaaauccuguggcagctt

SEQ ID NO: 667 - DNA, 21 bp, Artificial Sequence
  source: /note="Description of Combined DNA/RNA Molecule: Synthetic oligonucleotide"
  source: /note="Description of Artificial Sequence: Synthetic oligonucleotide"
cagguucaugggugccgcatt

SEQ ID NO: 668 - DNA, 21 bp, Artificial Sequence
  source: /note="Description of Combined DNA/RNA Molecule: Synthetic oligonucleotide"
  source: /note="Description of Artificial Sequence: Synthetic oligonucleotide"
ugcggcacccaugaaccugtt

SEQ ID NO: 669 - DNA, 21 bp, Artificial Sequence
  source: /note="Description of Combined DNA/RNA Molecule: Synthetic oligonucleotide"
  source: /note="Description of Artificial Sequence: Synthetic oligonucleotide"
aaauugcugcuggagaggctt

SEQ ID NO: 670 - DNA, 21 bp, Artificial Sequence
  source: /note="Description of Combined DNA/RNA Molecule: Synthetic oligonucleotide"
  source: /note="Description of Artificial Sequence: Synthetic oligonucleotide"
gccucuccagcagcaauuutt

SEQ ID NO: 671 - DNA, 21 bp, Artificial Sequence
  source: /note="Description of Combined DNA/RNA Molecule: Synthetic oligonucleotide"
  source: /note="Description of Artificial Sequence: Synthetic oligonucleotide"
auugcugcuggagaggcugtt

SEQ ID NO: 672 - DNA, 21 bp, Artificial Sequence
  source: /note="Description of Combined DNA/RNA Molecule: Synthetic oligonucleotide"
  source: /note="Description of Artificial Sequence: Synthetic oligonucleotide"
cagccucuccagcagcaautt

SEQ ID NO: 673 - DNA, 21 bp, Artificial Sequence
  source: /note="Description of Combined DNA/RNA Molecule: Synthetic oligonucleotide"
  source: /note="Description of Artificial Sequence: Synthetic oligonucleotide"
ugaaauugcaucccuugcutt

SEQ ID NO: 674 - DNA, 21 bp, Artificial Sequence
  source: /note="Description of Combined DNA/RNA Molecule: Synthetic oligonucleotide"
  source: /note="Description of Artificial Sequence: Synthetic oligonucleotide"
agcaagggaugcaauuucatt

SEQ ID NO: 675 - DNA, 21 bp, Artificial Sequence
  source: /note="Description of Combined DNA/RNA Molecule: Synthetic oligonucleotide"
  source: /note="Description of Artificial Sequence: Synthetic oligonucleotide"
uuuuguuagaauuuuugcutt

SEQ ID NO: 676 - DNA, 21 bp, Artificial Sequence
  source: /note="Description of Combined DNA/RNA Molecule: Synthetic oligonucleotide"
  source: /note="Description of Artificial Sequence: Synthetic oligonucleotide"
agcaaaaauucuaacaaaatt

SEQ ID NO: 677 - DNA, 21 bp, Artificial Sequence
  source: /note="Description of Combined DNA/RNA Molecule: Synthetic oligonucleotide"
  source: /note="Description of Artificial Sequence: Synthetic oligonucleotide"
uuuguuagaauuuuugcugtt

SEQ ID NO: 678 - DNA, 21 bp, Artificial Sequence
  source: /note="Description of Combined DNA/RNA Molecule: Synthetic oligonucleotide"
  source: /note="Description of Artificial Sequence: Synthetic oligonucleotide"
cagcaaaaauucuaacaaatt

SEQ ID NO: 679 - DNA, 21 bp, Artificial Sequence
  source: /note="Description of Combined DNA/RNA Molecule: Synthetic oligonucleotide"
  source: /note="Description of Artificial Sequence: Synthetic oligonucleotide"
ggcugcugcuacuauagaatt

SEQ ID NO: 680 - DNA, 21 bp, Artificial Sequence
  source: /note="Description of Combined DNA/RNA Molecule: Synthetic oligonucleotide"
  source: /note="Description of Artificial Sequence: Synthetic oligonucleotide"
uucuauaguagcagcagcctt

SEQ ID NO: 681 - DNA, 21 bp, Artificial Sequence
  source: /note="Description of Combined DNA/RNA Molecule: Synthetic oligonucleotide"
  source: /note="Description of Artificial Sequence: Synthetic oligonucleotide"
uuguuagaauuuuugcuggtt

SEQ ID NO: 682 - DNA, 21 bp, Artificial Sequence
  source: /note="Description of Combined DNA/RNA Molecule: Synthetic oligonucleotide"
  source: /note="Description of Artificial Sequence: Synthetic oligonucleotide"
ccagcaaaaauucuaacaatt

SEQ ID NO: 683 - DNA, 21 bp, Artificial Sequence
  source: /note="Description of Combined DNA/RNA Molecule: Synthetic oligonucleotide"
  source: /note="Description of Artificial Sequence: Synthetic oligonucleotide"
uuuuuuuguguuuucaggutt

SEQ ID NO: 684 - DNA, 21 bp, Artificial Sequence
  source: /note="Description of Combined DNA/RNA Molecule: Synthetic oligonucleotide"
  source: /note="Description of Artificial Sequence: Synthetic oligonucleotide"
accugaaaacacaaaaaaatt

SEQ ID NO: 685 - DNA, 21 bp, Artificial Sequence
  source: /note="Description of Combined DNA/RNA Molecule: Synthetic oligonucleotide"
  source: /note="Description of Artificial Sequence: Synthetic oligonucleotide"
gaaacuacuugggcaauagtt

SEQ ID NO: 686 - DNA, 21 bp, Artificial Sequence
  source: /note="Description of Combined DNA/RNA Molecule: Synthetic oligonucleotide"
  source: /note="Description of Artificial Sequence: Synthetic oligonucleotide"
cuauugcccaaguaguuuctt

SEQ ID NO: 687 - DNA, 21 bp, Artificial Sequence
  source: /note="Description of Combined DNA/RNA Molecule: Synthetic oligonucleotide"
  source: /note="Description of Artificial Sequence: Synthetic oligonucleotide"
aauggauguugccuuuacutt

SEQ ID NO: 688 - DNA, 21 bp, Artificial Sequence
  source: /note="Description of Combined DNA/RNA Molecule: Synthetic oligonucleotide"
  source: /note="Description of Artificial Sequence: Synthetic oligonucleotide"
aguaaaggcaacauccauutt

SEQ ID NO: 689 - DNA, 21 bp, Artificial Sequence
  source: /note="Description of Combined DNA/RNA Molecule: Synthetic oligonucleotide"
  source: /note="Description of Artificial Sequence: Synthetic oligonucleotide"
ccucaauggauguugccuutt

SEQ ID NO: 690 - DNA, 21 bp, Artificial Sequence
  source: /note="Description of Combined DNA/RNA Molecule: Synthetic oligonucleotide"
  source: /note="Description of Artificial Sequence: Synthetic oligonucleotide"
aaggcaacauccauugaggtt

SEQ ID NO: 691 - DNA, 21 bp, Artificial Sequence
  source: /note="Description of Combined DNA/RNA Molecule: Synthetic oligonucleotide"
  source: /note="Description of Artificial Sequence: Synthetic oligonucleotide"
uugccuuuacuuuuagggutt

SEQ ID NO: 692 - DNA, 21 bp, Artificial Sequence
  source: /note="Description of Combined DNA/RNA Molecule: Synthetic oligonucleotide"
  source: /note="Description of Artificial Sequence: Synthetic oligonucleotide"
acccuaaaaguaaaggcaatt

SEQ ID NO: 693 - DNA, 21 bp, Artificial Sequence
  source: /note="Description of Combined DNA/RNA Molecule: Synthetic oligonucleotide"
  source: /note="Description of Artificial Sequence: Synthetic oligonucleotide"
agaaacuacuugggcaauatt

SEQ ID NO: 694 - DNA, 21 bp, Artificial Sequence
  source: /note="Description of Combined DNA/RNA Molecule: Synthetic oligonucleotide"
  source: /note="Description of Artificial Sequence: Synthetic oligonucleotide"
uauugcccaaguaguuucutt

SEQ ID NO: 695 - DNA, 21 bp, Artificial Sequence
  source: /note="Description of Combined DNA/RNA Molecule: Synthetic oligonucleotide"
  source: /note="Description of Artificial Sequence: Synthetic oligonucleotide"
aagaaacuacuugggcaautt

SEQ ID NO: 696 - DNA, 21 bp, Artificial Sequence
  source: /note="Description of Combined DNA/RNA Molecule: Synthetic oligonucleotide"
  source: /note="Description of Artificial Sequence: Synthetic oligonucleotide"
auugcccaaguaguuucuutt

SEQ ID NO: 697 - DNA, 21 bp, Artificial Sequence
  source: /note="Description of Combined DNA/RNA Molecule: Synthetic oligonucleotide"
  source: /note="Description of Artificial Sequence: Synthetic oligonucleotide"
ugccuuuacuuuuaggguutt

SEQ ID NO: 698 - DNA, 21 bp, Artificial Sequence
  source: /note="Description of Combined DNA/RNA Molecule: Synthetic oligonucleotide"
  source: /note="Description of Artificial Sequence: Synthetic oligonucleotide"
aacccuaaaaguaaaggcatt

SEQ ID NO: 699 - DNA, 21 bp, Artificial Sequence
  source: /note="Description of Combined DNA/RNA Molecule: Synthetic oligonucleotide"
  source: /note="Description of Artificial Sequence: Synthetic oligonucleotide"
gccuuuacuuuuaggguugtt

SEQ ID NO: 700 - DNA, 21 bp, Artificial Sequence
  source: /note="Description of Combined DNA/RNA Molecule: Synthetic oligonucleotide"
  source: /note="Description of Artificial Sequence: Synthetic oligonucleotide"
caacccuaaaaguaaaggctt

SEQ ID NO: 701 - DNA, 21 bp, Artificial Sequence
  source: /note="Description of Combined DNA/RNA Molecule: Synthetic oligonucleotide"
  source: /note="Description of Artificial Sequence: Synthetic oligonucleotide"
cuuuacuuuuaggguuguatt

SEQ ID NO: 702 - DNA, 21 bp, Artificial Sequence
  source: /note="Description of Combined DNA/RNA Molecule: Synthetic oligonucleotide"
  source: /note="Description of Artificial Sequence: Synthetic oligonucleotide"
uacaacccuaaaaguaaagtt

SEQ ID NO: 703 - DNA, 21 bp, Artificial Sequence
  source: /note="Description of Combined DNA/RNA Molecule: Synthetic oligonucleotide"
  source: /note="Description of Artificial Sequence: Synthetic oligonucleotide"
uuuacuuuuaggguuguactt

SEQ ID NO: 704 - DNA, 21 bp, Artificial Sequence
  source: /note="Description of Combined DNA/RNA Molecule: Synthetic oligonucleotide"
  source: /note="Description of Artificial Sequence: Synthetic oligonucleotide"
guacaacccuaaaaguaaatt

SEQ ID NO: 705 - DNA, 21 bp, Artificial Sequence
  source: /note="Description of Combined DNA/RNA Molecule: Synthetic oligonucleotide"
  source: /note="Description of Artificial Sequence: Synthetic oligonucleotide"
uacuuuuaggguuguacggtt

SEQ ID NO: 706 - DNA, 21 bp, Artificial Sequence
  source: /note="Description of Combined DNA/RNA Molecule: Synthetic oligonucleotide"
  source: /note="Description of Artificial Sequence: Synthetic oligonucleotide"
ccguacaacccuaaaaguatt

SEQ ID NO: 707 - DNA, 21 bp, Artificial Sequence
  source: /note="Description of Combined DNA/RNA Molecule: Synthetic oligonucleotide"
  source: /note="Description of Artificial Sequence: Synthetic oligonucleotide"
ggaagaaacuacuugggcatt

SEQ ID NO: 708 - DNA, 21 bp, Artificial Sequence
  source: /note="Description of Combined DNA/RNA Molecule: Synthetic oligonucleotide"
  source: /note="Description of Artificial Sequence: Synthetic oligonucleotide"
ugcccaaguaguuucuucctt

SEQ ID NO: 709 - DNA, 21 bp, Artificial Sequence
  source: /note="Description of Combined DNA/RNA Molecule: Synthetic oligonucleotide"
  source: /note="Description of Artificial Sequence: Synthetic oligonucleotide"
caauggauguugccuuuactt

SEQ ID NO: 710 - DNA, 21 bp, Artificial Sequence
  source: /note="Description of Combined DNA/RNA Molecule: Synthetic oligonucleotide"
  source: /note="Description of Artificial Sequence: Synthetic oligonucleotide"
guaaaggcaacauccauugtt

SEQ ID NO: 711 - DNA, 21 bp, Artificial Sequence
  source: /note="Description of Combined DNA/RNA Molecule: Synthetic oligonucleotide"
  source: /note="Description of Artificial Sequence: Synthetic oligonucleotide"
ggauguugccuuuacuuuutt

SEQ ID NO: 712 - DNA, 21 bp, Artificial Sequence
  source: /note="Description of Combined DNA/RNA Molecule: Synthetic oligonucleotide"
  source: /note="Description of Artificial Sequence: Synthetic oligonucleotide"
aaaaguaaaggcaacaucctt

SEQ ID NO: 713 - DNA, 21 bp, Artificial Sequence
  source: /note="Description of Combined DNA/RNA Molecule: Synthetic oligonucleotide"
  source: /note="Description of Artificial Sequence: Synthetic oligonucleotide"
uguugccuuuacuuuuaggtt

SEQ ID NO: 714 - DNA, 21 bp, Artificial Sequence
  source: /note="Description of Combined DNA/RNA Molecule: Synthetic oligonucleotide"
  source: /note="Description of Artificial Sequence: Synthetic oligonucleotide"
ccuaaaaguaaaggcaacatt

SEQ ID NO: 715 - DNA, 21 bp, Artificial Sequence
  source: /note="Description of Combined DNA/RNA Molecule: Synthetic oligonucleotide"
  source: /note="Description of Artificial Sequence: Synthetic oligonucleotide"
gauguugccuuuacuuuuatt

SEQ ID NO: 716 - DNA, 21 bp, Artificial Sequence
  source: /note="Description of Combined DNA/RNA Molecule: Synthetic oligonucleotide"
  source: /note="Description of Artificial Sequence: Synthetic oligonucleotide"
uaaaaguaaaggcaacauctt

SEQ ID NO: 717 - DNA, 21 bp, Artificial Sequence
  source: /note="Description of Combined DNA/RNA Molecule: Synthetic oligonucleotide"
  source: /note="Description of Artificial Sequence: Synthetic oligonucleotide"
ccagaagacuacuaugauatt

SEQ ID NO: 718 - DNA, 21 bp, Artificial Sequence
  source: /note="Description of Combined DNA/RNA Molecule: Synthetic oligonucleotide"
  source: /note="Description of Artificial Sequence: Synthetic oligonucleotide"
uaucauaguagucuucuggtt

SEQ ID NO: 719 - DNA, 21 bp, Artificial Sequence
  source: /note="Description of Combined DNA/RNA Molecule: Synthetic oligonucleotide"
  source: /note="Description of Artificial Sequence: Synthetic oligonucleotide"
uccagaagacuacuaugautt

SEQ ID NO: 720 - DNA, 21 bp, Artificial Sequence
  source: /note="Description of Combined DNA/RNA Molecule: Synthetic oligonucleotide"
  source: /note="Description of Artificial Sequence: Synthetic oligonucleotide"
aucauaguagucuucuggatt

SEQ ID NO: 721 - DNA, 21 bp, Artificial Sequence
  source: /note="Description of Combined DNA/RNA Molecule: Synthetic oligonucleotide"
  source: /note="Description of Artificial Sequence: Synthetic oligonucleotide"
uuuggaagaaacuacuuggtt

SEQ ID NO: 722 - DNA, 21 bp, Artificial Sequence
  source: /note="Description of Combined DNA/RNA Molecule: Synthetic oligonucleotide"
  source: /note="Description of Artificial Sequence: Synthetic oligonucleotide"
ccaaguaguuucuuccaaatt

SEQ ID NO: 723 - DNA, 21 bp, Artificial Sequence
  source: /note="Description of Combined DNA/RNA Molecule: Synthetic oligonucleotide"
  source: /note="Description of Artificial Sequence: Synthetic oligonucleotide"
cuccucaauggauguugcctt

SEQ ID NO: 724 - DNA, 21 bp, Artificial Sequence
  source: /note="Description of Combined DNA/RNA Molecule: Synthetic oligonucleotide"
  source: /note="Description of Artificial Sequence: Synthetic oligonucleotide"
ggcaacauccauugaggagtt

SEQ ID NO: 725 - DNA, 21 bp, Artificial Sequence
  source: /note="Description of Combined DNA/RNA Molecule: Synthetic oligonucleotide"
  source: /note="Description of Artificial Sequence: Synthetic oligonucleotide"
ccaaaugugcaaucuggugtt

SEQ ID NO: 726 - DNA, 21 bp, Artificial Sequence
  source: /note="Description of Combined DNA/RNA Molecule: Synthetic oligonucleotide"
  source: /note="Description of Artificial Sequence: Synthetic oligonucleotide"
caccagauugcacauuuggtt

SEQ ID NO: 727 - DNA, 21 bp, Artificial Sequence
  source: /note="Description of Combined DNA/RNA Molecule: Synthetic oligonucleotide"
  source: /note="Description of Artificial Sequence: Synthetic oligonucleotide"
caaaugugcaaucuggugatt

SEQ ID NO: 728 - DNA, 21 bp, Artificial Sequence
  source: /note="Description of Combined DNA/RNA Molecule: Synthetic oligonucleotide"
  source: /note="Description of Artificial Sequence: Synthetic oligonucleotide"
ucaccagauugcacauuugtt

SEQ ID NO: 729 - DNA, 21 bp, Artificial Sequence
  source: /note="Description of Combined DNA/RNA Molecule: Synthetic oligonucleotide"
  source: /note="Description of Artificial Sequence: Synthetic oligonucleotide"
agaucugcuccucaauggatt

SEQ ID NO: 730 - DNA, 21 bp, Artificial Sequence
  source: /note="Description of Combined DNA/RNA Molecule: Synthetic oligonucleotide"
  source: /note="Description of Artificial Sequence: Synthetic oligonucleotide"
uccauugaggagcagaucutt

SEQ ID NO: 731 - DNA, 21 bp, Artificial Sequence
  source: /note="Description of Combined DNA/RNA Molecule: Synthetic oligonucleotide"
  source: /note="Description of Artificial Sequence: Synthetic oligonucleotide"
cucaauggauguugccuuutt

SEQ ID NO: 732 - DNA, 21 bp, Artificial Sequence
  source: /note="Description of Combined DNA/RNA Molecule: Synthetic oligonucleotide"
  source: /note="Description of Artificial Sequence: Synthetic oligonucleotide"
aaaggcaacauccauugagtt

SEQ ID NO: 733 - DNA, 21 bp, Artificial Sequence
  source: /note="Description of Combined DNA/RNA Molecule: Synthetic oligonucleotide"
  source: /note="Description of Artificial Sequence: Synthetic oligonucleotide"
gcucaaauuuuauauaagatt

SEQ ID NO: 734 - DNA, 21 bp, Artificial Sequence
  source: /note="Description of Combined DNA/RNA Molecule: Synthetic oligonucleotide"
  source: /note="Description of Artificial Sequence: Synthetic oligonucleotide"
ucuuauauaaaauuugagctt

SEQ ID NO: 735 - DNA, 21 bp, Artificial Sequence
  source: /note="Description of Combined DNA/RNA Molecule: Synthetic oligonucleotide"
  source: /note="Description of Artificial Sequence: Synthetic oligonucleotide"
agccugauuuugguacaugtt

SEQ ID NO: 736 - DNA, 21 bp, Artificial Sequence
  source: /note="Description of Combined DNA/RNA Molecule: Synthetic oligonucleotide"
  source: /note="Description of Artificial Sequence: Synthetic oligonucleotide"
cauguaccaaaaucaggcutt

SEQ ID NO: 737 - DNA, 21 bp, Artificial Sequence
  source: /note="Description of Combined DNA/RNA Molecule: Synthetic oligonucleotide"
  source: /note="Description of Artificial Sequence: Synthetic oligonucleotide"
cucaaauuuuauauaagaatt

SEQ ID NO: 738 - DNA, 21 bp, Artificial Sequence
  source: /note="Description of Combined DNA/RNA Molecule: Synthetic oligonucleotide"
  source: /note="Description of Artificial Sequence: Synthetic oligonucleotide"
uucuuauauaaaauuugagtt

SEQ ID NO: 739 - DNA, 21 bp, Artificial Sequence
  source: /note="Description of Combined DNA/RNA Molecule: Synthetic oligonucleotide"
  source: /note="Description of Artificial Sequence: Synthetic oligonucleotide"
acaaagugcugaauagggatt

SEQ ID NO: 740 - DNA, 21 bp, Artificial Sequence
  source: /note="Description of Combined DNA/RNA Molecule: Synthetic oligonucleotide"
  source: /note="Description of Artificial Sequence: Synthetic oligonucleotide"
ucccuauucagcacuuugutt

SEQ ID NO: 741 - DNA, 21 bp, Artificial Sequence
  source: /note="Description of Combined DNA/RNA Molecule: Synthetic oligonucleotide"
  source: /note="Description of Artificial Sequence: Synthetic oligonucleotide"
cugauuuugguacauggaatt

SEQ ID NO: 742 - DNA, 21 bp, Artificial Sequence
  source: /note="Description of Combined DNA/RNA Molecule: Synthetic oligonucleotide"
  source: /note="Description of Artificial Sequence: Synthetic oligonucleotide"
uuccauguaccaaaaucagtt

SEQ ID NO: 743 - DNA, 21 bp, Artificial Sequence
  source: /note="Description of Combined DNA/RNA Molecule: Synthetic oligonucleotide"
  source: /note="Description of Artificial Sequence: Synthetic oligonucleotide"
gauuuugguacauggaauatt

SEQ ID NO: 744 - DNA, 21 bp, Artificial Sequence
  source: /note="Description of Combined DNA/RNA Molecule: Synthetic oligonucleotide"
  source: /note="Description of Artificial Sequence: Synthetic oligonucleotide"
uauuccauguaccaaaauctt

SEQ ID NO: 745 - DNA, 21 bp, Artificial Sequence
  source: /note="Description of Combined DNA/RNA Molecule: Synthetic oligonucleotide"
  source: /note="Description of Artificial Sequence: Synthetic oligonucleotide"
cucaucagccugauuuuggtt

SEQ ID NO: 746 - DNA, 21 bp, Artificial Sequence
  source: /note="Description of Combined DNA/RNA Molecule: Synthetic oligonucleotide"
  source: /note="Description of Artificial Sequence: Synthetic oligonucleotide"
ccaaaaucaggcugaugagtt

SEQ ID NO: 747 - DNA, 21 bp, Artificial Sequence
  source: /note="Description of Combined DNA/RNA Molecule: Synthetic oligonucleotide"
  source: /note="Description of Artificial Sequence: Synthetic oligonucleotide"
agcccacuuguguggauagtt

SEQ ID NO: 748 - DNA, 21 bp, Artificial Sequence
  source: /note="Description of Combined DNA/RNA Molecule: Synthetic oligonucleotide"
  source: /note="Description of Artificial Sequence: Synthetic oligonucleotide"
cuauccacacaagugggcutt

SEQ ID NO: 749 - DNA, 21 bp, Artificial Sequence
  source: /note="Description of Combined DNA/RNA Molecule: Synthetic oligonucleotide"
  source: /note="Description of Artificial Sequence: Synthetic oligonucleotide"
gugcugaauagggaggaautt

SEQ ID NO: 750 - DNA, 21 bp, Artificial Sequence
  source: /note="Description of Combined DNA/RNA Molecule: Synthetic oligonucleotide"
  source: /note="Description of Artificial Sequence: Synthetic oligonucleotide"
auuccucccuauucagcactt

SEQ ID NO: 751 - DNA, 21 bp, Artificial Sequence
  source: /note="Description of Combined DNA/RNA Molecule: Synthetic oligonucleotide"
  source: /note="Description of Artificial Sequence: Synthetic oligonucleotide"
aguaagggcguggaggcuutt

SEQ ID NO: 752 - DNA, 21 bp, Artificial Sequence
  source: /note="Description of Combined DNA/RNA Molecule: Synthetic oligonucleotide"
  source: /note="Description of Artificial Sequence: Synthetic oligonucleotide"
aagccuccacgcccuuacutt

SEQ ID NO: 753 - DNA, 21 bp, Artificial Sequence
  source: /note="Description of Combined DNA/RNA Molecule: Synthetic oligonucleotide"
  source: /note="Description of Artificial Sequence: Synthetic oligonucleotide"
gugacuuaacccaagaagctt

SEQ ID NO: 754 - DNA, 21 bp, Artificial Sequence
  source: /note="Description of Combined DNA/RNA Molecule: Synthetic oligonucleotide"
  source: /note="Description of Artificial Sequence: Synthetic oligonucleotide"
gcuucuuggguuaagucactt

SEQ ID NO: 755 - DNA, 21 bp, Artificial Sequence
  source: /note="Description of Combined DNA/RNA Molecule: Synthetic oligonucleotide"
  source: /note="Description of Artificial Sequence: Synthetic oligonucleotide"
uaguaagggcguggaggcutt

SEQ ID NO: 756 - DNA, 21 bp, Artificial Sequence
  source: /note="Description of Combined DNA/RNA Molecule: Synthetic oligonucleotide"
  source: /note="Description of Artificial Sequence: Synthetic oligonucleotide"
agccuccacgcccuuacuatt

SEQ ID NO: 757 - DNA, 21 bp, Artificial Sequence
  source: /note="Description of Combined DNA/RNA Molecule: Synthetic oligonucleotide"
  source: /note="Description of Artificial Sequence: Synthetic oligonucleotide"
ucaucagccugauuuuggutt

SEQ ID NO: 758 - DNA, 21 bp, Artificial Sequence
  source: /note="Description of Combined DNA/RNA Molecule: Synthetic oligonucleotide"
  source: /note="Description of Artificial Sequence: Synthetic oligonucleotide"
accaaaaucaggcugaugatt

SEQ ID NO: 759 - DNA, 21 bp, Artificial Sequence
  source: /note="Description of Combined DNA/RNA Molecule: Synthetic oligonucleotide"
  source: /note="Description of Artificial Sequence: Synthetic oligonucleotide"
guagaagacccuaaagacutt

SEQ ID NO: 760 - DNA, 21 bp, Artificial Sequence
  source: /note="Description of Combined DNA/RNA Molecule: Synthetic oligonucleotide"
  source: /note="Description of Artificial Sequence: Synthetic oligonucleotide"
agucuuuagggucuucuactt

SEQ ID NO: 761 - DNA, 21 bp, Artificial Sequence
  source: /note="Description of Combined DNA/RNA Molecule: Synthetic oligonucleotide"
  source: /note="Description of Artificial Sequence: Synthetic oligonucleotide"
agguagaagacccuaaagatt

SEQ ID NO: 762 - DNA, 21 bp, Artificial Sequence
  source: /note="Description of Combined DNA/RNA Molecule: Synthetic oligonucleotide"
  source: /note="Description of Artificial Sequence: Synthetic oligonucleotide"
ucuuuagggucuucuaccutt

SEQ ID NO: 763 - DNA, 21 bp, Artificial Sequence
  source: /note="Description of Combined DNA/RNA Molecule: Synthetic oligonucleotide"
  source: /note="Description of Artificial Sequence: Synthetic oligonucleotide"
aaaagguagaagacccuaatt

SEQ ID NO: 764 - DNA, 21 bp, Artificial Sequence
  source: /note="Description of Combined DNA/RNA Molecule: Synthetic oligonucleotide"
  source: /note="Description of Artificial Sequence: Synthetic oligonucleotide"
uuagggucuucuaccuuuutt

SEQ ID NO: 765 - DNA, 21 bp, Artificial Sequence
  source: /note="Description of Combined DNA/RNA Molecule: Synthetic oligonucleotide"
  source: /note="Description of Artificial Sequence: Synthetic oligonucleotide"
aaagguagaagacccuaaatt

SEQ ID NO: 766 - DNA, 21 bp, Artificial Sequence
  source: /note="Description of Combined DNA/RNA Molecule: Synthetic oligonucleotide"
  source: /note="Description of Artificial Sequence: Synthetic oligonucleotide"
uuuagggucuucuaccuuutt

SEQ ID NO: 767 - DNA, 21 bp, Artificial Sequence
  source: /note="Description of Combined DNA/RNA Molecule: Synthetic oligonucleotide"
  source: /note="Description of Artificial Sequence: Synthetic oligonucleotide"
gauugugcaguggaaagaatt

SEQ ID NO: 768 - DNA, 21 bp, Artificial Sequence
  source: /note="Description of Combined DNA/RNA Molecule: Synthetic oligonucleotide"
  source: /note="Description of Artificial Sequence: Synthetic oligonucleotide"
uucuuuccacugcacaauctt

SEQ ID NO: 769 - DNA, 21 bp, Artificial Sequence
  source: /note="Description of Combined DNA/RNA Molecule: Synthetic oligonucleotide"
  source: /note="Description of Artificial Sequence: Synthetic oligonucleotide"
ggauugugcaguggaaagatt

SEQ ID NO: 770 - DNA, 21 bp, Artificial Sequence
  source: /note="Description of Combined DNA/RNA Molecule: Synthetic oligonucleotide"
  source: /note="Description of Artificial Sequence: Synthetic oligonucleotide"
ucuuuccacugcacaaucctt

SEQ ID NO: 771 - DNA, 21 bp, Artificial Sequence
  source: /note="Description of Combined DNA/RNA Molecule: Synthetic oligonucleotide"
  source: /note="Description of Artificial Sequence: Synthetic oligonucleotide"
uguagacagccauaugcagtt

SEQ ID NO: 772 - DNA, 21 bp, Artificial Sequence
  source: /note="Description of Combined DNA/RNA Molecule: Synthetic oligonucleotide"
  source: /note="Description of Artificial Sequence: Synthetic oligonucleotide"
cugcauauggcugucuacatt

SEQ ID NO: 773 - DNA, 21 bp, Artificial Sequence
  source: /note="Description of Combined DNA/RNA Molecule: Synthetic oligonucleotide"
  source: /note="Description of Artificial Sequence: Synthetic oligonucleotide"
caugacuuuaacccagaagtt

SEQ ID NO: 774 - DNA, 21 bp, Artificial Sequence
  source: /note="Description of Combined DNA/RNA Molecule: Synthetic oligonucleotide"
  source: /note="Description of Artificial Sequence: Synthetic oligonucleotide"
cuucuggguuaaagucaugtt

SEQ ID NO: 775 - DNA, 21 bp, Artificial Sequence
  source: /note="Description of Combined DNA/RNA Molecule: Synthetic oligonucleotide"
  source: /note="Description of Artificial Sequence: Synthetic oligonucleotide"
auagggaggaauccauggatt

SEQ ID NO: 776 - DNA, 21 bp, Artificial Sequence
  source: /note="Description of Combined DNA/RNA Molecule: Synthetic oligonucleotide"
  source: /note="Description of Artificial Sequence: Synthetic oligonucleotide"
uccauggauuccucccuautt

SEQ ID NO: 777 - DNA, 21 bp, Artificial Sequence
  source: /note="Description of Combined DNA/RNA Molecule: Synthetic oligonucleotide"
  source: /note="Description of Artificial Sequence: Synthetic oligonucleotide"
cugaauagggaggaauccatt

SEQ ID NO: 778 - DNA, 21 bp, Artificial Sequence
  source: /note="Description of Combined DNA/RNA Molecule: Synthetic oligonucleotide"
  source: /note="Description of Artificial Sequence: Synthetic oligonucleotide"
uggauuccucccuauucagtt

SEQ ID NO: 779 - DNA, 21 bp, Artificial Sequence
  source: /note="Description of Combined DNA/RNA Molecule: Synthetic oligonucleotide"
  source: /note="Description of Artificial Sequence: Synthetic oligonucleotide"
aaagugcugaauagggaggtt

SEQ ID NO: 780 - DNA, 21 bp, Artificial Sequence
  source: /note="Description of Combined DNA/RNA Molecule: Synthetic oligonucleotide"
  source: /note="Description of Artificial Sequence: Synthetic oligonucleotide"
ccucccuauucagcacuuutt

SEQ ID NO: 781 - DNA, 21 bp, Artificial Sequence
  source: /note="Description of Combined DNA/RNA Molecule: Synthetic oligonucleotide"
  source: /note="Description of Artificial Sequence: Synthetic oligonucleotide"
ugacuuaacccaagaagcutt

SEQ ID NO: 782 - DNA, 21 bp, Artificial Sequence
  source: /note="Description of Combined DNA/RNA Molecule: Synthetic oligonucleotide"
  source: /note="Description of Artificial Sequence: Synthetic oligonucleotide"
agcuucuuggguuaagucatt

SEQ ID NO: 783 - DNA, 21 bp, Artificial Sequence
  source: /note="Description of Combined DNA/RNA Molecule: Synthetic oligonucleotide"
  source: /note="Description of Artificial Sequence: Synthetic oligonucleotide"
augacuuuaacccagaagatt

SEQ ID NO: 784 - DNA, 21 bp, Artificial Sequence
  source: /note="Description of Combined DNA/RNA Molecule: Synthetic oligonucleotide"
  source: /note="Description of Artificial Sequence: Synthetic oligonucleotide"
ucuucuggguuaaagucautt

SEQ ID NO: 785 - DNA, 21 bp, Artificial Sequence
  source: /note="Description of Combined DNA/RNA Molecule: Synthetic oligonucleotide"
  source: /note="Description of Artificial Sequence: Synthetic oligonucleotide"
gaagacccuaaagacuuuctt

SEQ ID NO: 786 - DNA, 21 bp, Artificial Sequence
  source: /note="Description of Combined DNA/RNA Molecule: Synthetic oligonucleotide"
  source: /note="Description of Artificial Sequence: Synthetic oligonucleotide"
gaaagucuuuagggucuuctt

SEQ ID NO: 787 - DNA, 21 bp, Artificial Sequence
  source: /note="Description of Combined DNA/RNA Molecule: Synthetic oligonucleotide"
  source: /note="Description of Artificial Sequence: Synthetic oligonucleotide"
aaaaagcucaaauuuuauatt

SEQ ID NO: 788 - DNA, 21 bp, Artificial Sequence
  source: /note="Description of Combined DNA/RNA Molecule: Synthetic oligonucleotide"
  source: /note="Description of Artificial Sequence: Synthetic oligonucleotide"
uauaaaauuugagcuuuuutt

SEQ ID NO: 789 - DNA, 21 bp, Artificial Sequence
  source: /note="Description of Combined DNA/RNA Molecule: Synthetic oligonucleotide"
  source: /note="Description of Artificial Sequence: Synthetic oligonucleotide"
aucagccugauuuugguactt

SEQ ID NO: 790 - DNA, 21 bp, Artificial Sequence
  source: /note="Description of Combined DNA/RNA Molecule: Synthetic oligonucleotide"
  source: /note="Description of Artificial Sequence: Synthetic oligonucleotide"
guaccaaaaucaggcugautt

SEQ ID NO: 791 - DNA, 21 bp, Artificial Sequence
  source: /note="Description of Combined DNA/RNA Molecule: Synthetic oligonucleotide"
  source: /note="Description of Artificial Sequence: Synthetic oligonucleotide"
caucagccugauuuugguatt

SEQ ID NO: 792 - DNA, 21 bp, Artificial Sequence
  source: /note="Description of Combined DNA/RNA Molecule: Synthetic oligonucleotide"
  source: /note="Description of Artificial Sequence: Synthetic oligonucleotide"
uaccaaaaucaggcugaugtt

SEQ ID NO: 793 - DNA, 21 bp, Artificial Sequence
  source: /note="Description of Combined DNA/RNA Molecule: Synthetic oligonucleotide"
  source: /note="Description of Artificial Sequence: Synthetic oligonucleotide"
auggacaaagugcugaauatt

SEQ ID NO: 794 - DNA, 21 bp, Artificial Sequence
  source: /note="Description of Combined DNA/RNA Molecule: Synthetic oligonucleotide"
  source: /note="Description of Artificial Sequence: Synthetic oligonucleotide"
uauucagcacuuuguccautt

SEQ ID NO: 795 - DNA, 21 bp, Artificial Sequence
  source: /note="Description of Combined DNA/RNA Molecule: Synthetic oligonucleotide"
  source: /note="Description of Artificial Sequence: Synthetic oligonucleotide"
uagaagacccuaaagacuutt

SEQ ID NO: 796 - DNA, 21 bp, Artificial Sequence
  source: /note="Description of Combined DNA/RNA Molecule: Synthetic oligonucleotide"
  source: /note="Description of Artificial Sequence: Synthetic oligonucleotide"
aagucuuuagggucuucuatt

SEQ ID NO: 797 - DNA, 21 bp, Artificial Sequence
  source: /note="Description of Combined DNA/RNA Molecule: Synthetic oligonucleotide"
  source: /note="Description of Artificial Sequence: Synthetic oligonucleotide"
aagguagaagacccuaaagtt

SEQ ID NO: 798 - DNA, 21 bp, Artificial Sequence
  source: /note="Description of Combined DNA/RNA Molecule: Synthetic oligonucleotide"
  source: /note="Description of Artificial Sequence: Synthetic oligonucleotide"
cuuuagggucuucuaccuutt

SEQ ID NO: 799 - DNA, 21 bp, Artificial Sequence
  source: /note="Description of Combined DNA/RNA Molecule: Synthetic oligonucleotide"
  source: /note="Description of Artificial Sequence: Synthetic oligonucleotide"
cagcccacuuguguggauatt

SEQ ID NO: 800 - DNA, 21 bp, Artificial Sequence
  source: /note="Description of Combined DNA/RNA Molecule: Synthetic oligonucleotide"
  source: /note="Description of Artificial Sequence: Synthetic oligonucleotide"
uauccacacaagugggcugtt

SEQ ID NO: 801 - DNA, 21 bp, Artificial Sequence
  source: /note="Description of Combined DNA/RNA Molecule: Synthetic oligonucleotide"
  source: /note="Description of Artificial Sequence: Synthetic oligonucleotide"
uuuugguacauggaauagutt

SEQ ID NO: 802 - DNA, 21 bp, Artificial Sequence
  source: /note="Description of Combined DNA/RNA Molecule: Synthetic oligonucleotide"
  source: /note="Description of Artificial Sequence: Synthetic oligonucleotide"
acuauuccauguaccaaaatt

SEQ ID NO: 803 - DNA, 21 bp, Artificial Sequence
  source: /note="Description of Combined DNA/RNA Molecule: Synthetic oligonucleotide"
  source: /note="Description of Artificial Sequence: Synthetic oligonucleotide"
ugaauagggaggaauccautt

SEQ ID NO: 804 - DNA, 21 bp, Artificial Sequence
  source: /note="Description of Combined DNA/RNA Molecule: Synthetic oligonucleotide"
  source: /note="Description of Artificial Sequence: Synthetic oligonucleotide"
auggauuccucccuauucatt

SEQ ID NO: 805 - DNA, 21 bp, Artificial Sequence
  source: /note="Description of Combined DNA/RNA Molecule: Synthetic oligonucleotide"
  source: /note="Description of Artificial Sequence: Synthetic oligonucleotide"
gcugaauagggaggaaucctt

SEQ ID NO: 806 - DNA, 21 bp, Artificial Sequence
  source: /note="Description of Combined DNA/RNA Molecule: Synthetic oligonucleotide"
  source: /note="Description of Artificial Sequence: Synthetic oligonucleotide"
ggauuccucccuauucagctt

SEQ ID NO: 807 - DNA, 21 bp, Artificial Sequence
  source: /note="Description of Combined DNA/RNA Molecule: Synthetic oligonucleotide"
  source: /note="Description of Artificial Sequence: Synthetic oligonucleotide"
ugcugaauagggaggaauctt

SEQ ID NO: 808 - DNA, 21 bp, Artificial Sequence
  source: /note="Description of Combined DNA/RNA Molecule: Synthetic oligonucleotide"
  source: /note="Description of Artificial Sequence: Synthetic oligonucleotide"
gauuccucccuauucagcatt

SEQ ID NO: 809 - DNA, 21 bp, Artificial Sequence
  source: /note="Description of Combined DNA/RNA Molecule: Synthetic oligonucleotide"
  source: /note="Description of Artificial Sequence: Synthetic oligonucleotide"
uguguagacagccauaugctt

SEQ ID NO: 810 - DNA, 21 bp, Artificial Sequence
  source: /note="Description of Combined DNA/RNA Molecule: Synthetic oligonucleotide"
  source: /note="Description of Artificial Sequence: Synthetic oligonucleotide"
gcauauggcugucuacacatt

SEQ ID NO: 811 - DNA, 21 bp, Artificial Sequence
  source: /note="Description of Combined DNA/RNA Molecule: Synthetic oligonucleotide"
  source: /note="Description of Artificial Sequence: Synthetic oligonucleotide"
ugcuuugauugcuucagactt

SEQ ID NO: 812 - DNA, 21 bp, Artificial Sequence
  source: /note="Description of Combined DNA/RNA Molecule: Synthetic oligonucleotide"
  source: /note="Description of Artificial Sequence: Synthetic oligonucleotide"
gucugaagcaaucaaagcatt

SEQ ID NO: 813 - DNA, 21 bp, Artificial Sequence
  source: /note="Description of Combined DNA/RNA Molecule: Synthetic oligonucleotide"
  source: /note="Description of Artificial Sequence: Synthetic oligonucleotide"
uugcuuugauugcuucagatt

SEQ ID NO: 814 - DNA, 21 bp, Artificial Sequence
  source: /note="Description of Combined DNA/RNA Molecule: Synthetic oligonucleotide"
  source: /note="Description of Artificial Sequence: Synthetic oligonucleotide"
ucugaagcaaucaaagcaatt

SEQ ID NO: 815 - DNA, 21 bp, Artificial Sequence
  source: /note="Description of Combined DNA/RNA Molecule: Synthetic oligonucleotide"
  source: /note="Description of Artificial Sequence: Synthetic oligonucleotide"
auugcuuugauugcuucagtt

SEQ ID NO: 816 - DNA, 21 bp, Artificial Sequence
  source: /note="Description of Combined DNA/RNA Molecule: Synthetic oligonucleotide"
  source: /note="Description of Artificial Sequence: Synthetic oligonucleotide"
cugaagcaaucaaagcaautt

SEQ ID NO: 817 - DNA, 21 bp, Artificial Sequence
  source: /note="Description of Combined DNA/RNA Molecule: Synthetic oligonucleotide"
  source: /note="Description of Artificial Sequence: Synthetic oligonucleotide"
cuauugcuuugauugcuuctt

SEQ ID NO: 818 - DNA, 21 bp, Artificial Sequence
  source: /note="Description of Combined DNA/RNA Molecule: Synthetic oligonucleotide"
  source: /note="Description of Artificial Sequence: Synthetic oligonucleotide"
gaagcaaucaaagcaauagtt

SEQ ID NO: 819 - DNA, 21 bp, Artificial Sequence
  source: /note="Description of Combined DNA/RNA Molecule: Synthetic oligonucleotide"
  source: /note="Description of Artificial Sequence: Synthetic oligonucleotide"
auugcaaggaauggccuaatt

SEQ ID NO: 820 - DNA, 21 bp, Artificial Sequence
  source: /note="Description of Combined DNA/RNA Molecule: Synthetic oligonucleotide"
  source: /note="Description of Artificial Sequence: Synthetic oligonucleotide"
uuaggccauuccuugcaautt

SEQ ID NO: 821 - DNA, 21 bp, Artificial Sequence
  source: /note="Description of Combined DNA/RNA Molecule: Synthetic oligonucleotide"
  source: /note="Description of Artificial Sequence: Synthetic oligonucleotide"
auuuuccuccuaauucugatt

SEQ ID NO: 822 - DNA, 21 bp, Artificial Sequence
  source: /note="Description of Combined DNA/RNA Molecule: Synthetic oligonucleotide"
  source: /note="Description of Artificial Sequence: Synthetic oligonucleotide"
ucagaauuaggaggaaaautt

SEQ ID NO: 823 - DNA, 21 bp, Artificial Sequence
  source: /note="Description of Combined DNA/RNA Molecule: Synthetic oligonucleotide"
  source: /note="Description of Artificial Sequence: Synthetic oligonucleotide"
gcucaucagccugauuuugtt

SEQ ID NO: 824 - DNA, 21 bp, Artificial Sequence
  source: /note="Description of Combined DNA/RNA Molecule: Synthetic oligonucleotide"
  source: /note="Description of Artificial Sequence: Synthetic oligonucleotide"
caaaaucaggcugaugagctt

SEQ ID NO: 825 - DNA, 21 bp, Artificial Sequence
  source: /note="Description of Combined DNA/RNA Molecule: Synthetic oligonucleotide"
  source: /note="Description of Artificial Sequence: Synthetic oligonucleotide"
ugcucaucagccugauuuutt

SEQ ID NO: 826 - DNA, 21 bp, Artificial Sequence
  source: /note="Description of Combined DNA/RNA Molecule: Synthetic oligonucleotide"
  source: /note="Description of Artificial Sequence: Synthetic oligonucleotide"
aaaaucaggcugaugagcatt

SEQ ID NO: 827 - DNA, 21 bp, Artificial Sequence
  source: /note="Description of Combined DNA/RNA Molecule: Synthetic oligonucleotide"
  source: /note="Description of Artificial Sequence: Synthetic oligonucleotide"
aguugcucaucagccugautt

SEQ ID NO: 828 - DNA, 21 bp, Artificial Sequence
  source: /note="Description of Combined DNA/RNA Molecule: Synthetic oligonucleotide"
  source: /note="Description of Artificial Sequence: Synthetic oligonucleotide"
aucaggcugaugagcaacutt

SEQ ID NO: 829 - DNA, 21 bp, Artificial Sequence
  source: /note="Description of Combined DNA/RNA Molecule: Synthetic oligonucleotide"
  source: /note="Description of Artificial Sequence: Synthetic oligonucleotide"
aagggcguggaggcuuuuutt

SEQ ID NO: 830 - DNA, 21 bp, Artificial Sequence
  source: /note="Description of Combined DNA/RNA Molecule: Synthetic oligonucleotide"
  source: /note="Description of Artificial Sequence: Synthetic oligonucleotide"
aaaaagccuccacgcccuutt

SEQ ID NO: 831 - DNA, 21 bp, Artificial Sequence
  source: /note="Description of Combined DNA/RNA Molecule: Synthetic oligonucleotide"
  source: /note="Description of Artificial Sequence: Synthetic oligonucleotide"
guaagggcguggaggcuuutt

SEQ ID NO: 832 - DNA, 21 bp, Artificial Sequence
  source: /note="Description of Combined DNA/RNA Molecule: Synthetic oligonucleotide"
  source: /note="Description of Artificial Sequence: Synthetic oligonucleotide"
aaagccuccacgcccuuactt

SEQ ID NO: 833 - DNA, 21 bp, Artificial Sequence
  source: /note="Description of Combined DNA/RNA Molecule: Synthetic oligonucleotide"
  source: /note="Description of Artificial Sequence: Synthetic oligonucleotide"
gacccuaaagacuuuccugtt

SEQ ID NO: 834 - DNA, 21 bp, Artificial Sequence
  source: /note="Description of Combined DNA/RNA Molecule: Synthetic oligonucleotide"
  source: /note="Description of Artificial Sequence: Synthetic oligonucleotide"
caggaaagucuuuaggguctt

SEQ ID NO: 835 - DNA, 21 bp, Artificial Sequence
  source: /note="Description of Combined DNA/RNA Molecule: Synthetic oligonucleotide"
  source: /note="Description of Artificial Sequence: Synthetic oligonucleotide"
aggagcaugacuuuaaccctt

SEQ ID NO: 836 - DNA, 21 bp, Artificial Sequence
  source: /note="Description of Combined DNA/RNA Molecule: Synthetic oligonucleotide"
  source: /note="Description of Artificial Sequence: Synthetic oligonucleotide"
ggguuaaagucaugcuccutt

SEQ ID NO: 837 - DNA, 21 bp, Artificial Sequence
  source: /note="Description of Combined DNA/RNA Molecule: Synthetic oligonucleotide"
  source: /note="Description of Artificial Sequence: Synthetic oligonucleotide"
ugugauuuuccuccuaauutt

SEQ ID NO: 838 - DNA, 21 bp, Artificial Sequence
  source: /note="Description of Combined DNA/RNA Molecule: Synthetic oligonucleotide"
  source: /note="Description of Artificial Sequence: Synthetic oligonucleotide"
aauuaggaggaaaaucacatt

SEQ ID NO: 839 - DNA, 21 bp, Artificial Sequence
  source: /note="Description of Combined DNA/RNA Molecule: Synthetic oligonucleotide"
  source: /note="Description of Artificial Sequence: Synthetic oligonucleotide"
uugugauuuuccuccuaautt

SEQ ID NO: 840 - DNA, 21 bp, Artificial Sequence
  source: /note="Description of Combined DNA/RNA Molecule: Synthetic oligonucleotide"
  source: /note="Description of Artificial Sequence: Synthetic oligonucleotide"
auuaggaggaaaaucacaatt

SEQ ID NO: 841 - DNA, 21 bp, Artificial Sequence
  source: /note="Description of Combined DNA/RNA Molecule: Synthetic oligonucleotide"
  source: /note="Description of Artificial Sequence: Synthetic oligonucleotide"
gacuuaacccaagaagcuctt

SEQ ID NO: 842 - DNA, 21 bp, Artificial Sequence
  source: /note="Description of Combined DNA/RNA Molecule: Synthetic oligonucleotide"
  source: /note="Description of Artificial Sequence: Synthetic oligonucleotide"
gagcuucuuggguuaaguctt

SEQ ID NO: 843 - DNA, 21 bp, Artificial Sequence
  source: /note="Description of Combined DNA/RNA Molecule: Synthetic oligonucleotide"
  source: /note="Description of Artificial Sequence: Synthetic oligonucleotide"
gcuucagacaaugguuuggtt

SEQ ID NO: 844 - DNA, 21 bp, Artificial Sequence
  source: /note="Description of Combined DNA/RNA Molecule: Synthetic oligonucleotide"
  source: /note="Description of Artificial Sequence: Synthetic oligonucleotide"
ccaaaccauugucugaagctt

SEQ ID NO: 845 - DNA, 21 bp, Artificial Sequence
  source: /note="Description of Combined DNA/RNA Molecule: Synthetic oligonucleotide"
  source: /note="Description of Artificial Sequence: Synthetic oligonucleotide"
uugcuucagacaaugguuutt

SEQ ID NO: 846 - DNA, 21 bp, Artificial Sequence
  source: /note="Description of Combined DNA/RNA Molecule: Synthetic oligonucleotide"
  source: /note="Description of Artificial Sequence: Synthetic oligonucleotide"
aaaccauugucugaagcaatt

SEQ ID NO: 847 - DNA, 21 bp, Artificial Sequence
  source: /note="Description of Combined DNA/RNA Molecule: Synthetic oligonucleotide"
  source: /note="Description of Artificial Sequence: Synthetic oligonucleotide"
auugcuucagacaaugguutt

SEQ ID NO: 848 - DNA, 21 bp, Artificial Sequence
  source: /note="Description of Combined DNA/RNA Molecule: Synthetic oligonucleotide"
  source: /note="Description of Artificial Sequence: Synthetic oligonucleotide"
aaccauugucugaagcaautt

SEQ ID NO: 849 - DNA, 21 bp, Artificial Sequence
  source: /note="Description of Combined DNA/RNA Molecule: Synthetic oligonucleotide"
  source: /note="Description of Artificial Sequence: Synthetic oligonucleotide"
uugauugcuucagacaaugtt

SEQ ID NO: 850 - DNA, 21 bp, Artificial Sequence
  source: /note="Description of Combined DNA/RNA Molecule: Synthetic oligonucleotide"
  source: /note="Description of Artificial Sequence: Synthetic oligonucleotide"
cauugucugaagcaaucaatt

SEQ ID NO: 851 - DNA, 21 bp, Artificial Sequence
  source: /note="Description of Combined DNA/RNA Molecule: Synthetic oligonucleotide"
  source: /note="Description of Artificial Sequence: Synthetic oligonucleotide"
gacaaagugcugaauagggtt

SEQ ID NO: 852 - DNA, 21 bp, Artificial Sequence
  source: /note="Description of Combined DNA/RNA Molecule: Synthetic oligonucleotide"
  source: /note="Description of Artificial Sequence: Synthetic oligonucleotide"
cccuauucagcacuuuguctt

SEQ ID NO: 853 - DNA, 21 bp, Artificial Sequence
  source: /note="Description of Combined DNA/RNA Molecule: Synthetic oligonucleotide"
  source: /note="Description of Artificial Sequence: Synthetic oligonucleotide"
aagaaaaagcucaaauuuutt

SEQ ID NO: 854 - DNA, 21 bp, Artificial Sequence
  source: /note="Description of Combined DNA/RNA Molecule: Synthetic oligonucleotide"
  source: /note="Description of Artificial Sequence: Synthetic oligonucleotide"
aaaauuugagcuuuuucuutt

SEQ ID NO: 855 - DNA, 21 bp, Artificial Sequence
  source: /note="Description of Combined DNA/RNA Molecule: Synthetic oligonucleotide"
  source: /note="Description of Artificial Sequence: Synthetic oligonucleotide"
aaagaaaaagcucaaauuutt

SEQ ID NO: 856 - DNA, 21 bp, Artificial Sequence
  source: /note="Description of Combined DNA/RNA Molecule: Synthetic oligonucleotide"
  source: /note="Description of Artificial Sequence: Synthetic oligonucleotide"
aaauuugagcuuuuucuuutt

SEQ ID NO: 857 - DNA, 21 bp, Artificial Sequence
  source: /note="Description of Combined DNA/RNA Molecule: Synthetic oligonucleotide"
  source: /note="Description of Artificial Sequence: Synthetic oligonucleotide"
agaagacccuaaagacuuutt

SEQ ID NO: 858 - DNA, 21 bp, Artificial Sequence
  source: /note="Description of Combined DNA/RNA Molecule: Synthetic oligonucleotide"
  source: /note="Description of Artificial Sequence: Synthetic oligonucleotide"
aaagucuuuagggucuucutt

SEQ ID NO: 859 - DNA, 21 bp, Artificial Sequence
  source: /note="Description of Combined DNA/RNA Molecule: Synthetic oligonucleotide"
  source: /note="Description of Artificial Sequence: Synthetic oligonucleotide"
aaaaaaaagguagaagacctt

SEQ ID NO: 860 - DNA, 21 bp, Artificial Sequence
  source: /note="Description of Combined DNA/RNA Molecule: Synthetic oligonucleotide"
  source: /note="Description of Artificial Sequence: Synthetic oligonucleotide"
ggucuucuaccuuuuuuuutt

SEQ ID NO: 861 - DNA, 21 bp, Artificial Sequence
  source: /note="Description of Combined DNA/RNA Molecule: Synthetic oligonucleotide"
  source: /note="Description of Artificial Sequence: Synthetic oligonucleotide"
gguagaagacccuaaagactt

SEQ ID NO: 862 - DNA, 21 bp, Artificial Sequence
  source: /note="Description of Combined DNA/RNA Molecule: Synthetic oligonucleotide"
  source: /note="Description of Artificial Sequence: Synthetic oligonucleotide"
gucuuuagggucuucuacctt

SEQ ID NO: 863 - DNA, 21 bp, Artificial Sequence
  source: /note="Description of Combined DNA/RNA Molecule: Synthetic oligonucleotide"
  source: /note="Description of Artificial Sequence: Synthetic oligonucleotide"
aaaaaagguagaagacccutt

SEQ ID NO: 864 - DNA, 21 bp, Artificial Sequence
  source: /note="Description of Combined DNA/RNA Molecule: Synthetic oligonucleotide"
  source: /note="Description of Artificial Sequence: Synthetic oligonucleotide"
agggucuucuaccuuuuuutt

SEQ ID NO: 865 - DNA, 21 bp, Artificial Sequence
  source: /note="Description of Combined DNA/RNA Molecule: Synthetic oligonucleotide"
  source: /note="Description of Artificial Sequence: Synthetic oligonucleotide"
aaaaagguagaagacccuatt

SEQ ID NO: 866 - DNA, 21 bp, Artificial Sequence
  source: /note="Description of Combined DNA/RNA Molecule: Synthetic oligonucleotide"
  source: /note="Description of Artificial Sequence: Synthetic oligonucleotide"
uagggucuucuaccuuuuutt

SEQ ID NO: 867 - DNA, 21 bp, Artificial Sequence
  source: /note="Description of Combined DNA/RNA Molecule: Synthetic oligonucleotide"
  source: /note="Description of Artificial Sequence: Synthetic oligonucleotide"
uuaacccaagaagcucuuctt

SEQ ID NO: 868 - DNA, 21 bp, Artificial Sequence
  source: /note="Description of Combined DNA/RNA Molecule: Synthetic oligonucleotide"
  source: /note="Description of Artificial Sequence: Synthetic oligonucleotide"
gaagagcuucuuggguuaatt

SEQ ID NO: 869 - DNA, 21 bp, Artificial Sequence
  source: /note="Description of Combined DNA/RNA Molecule: Synthetic oligonucleotide"
  source: /note="Description of Artificial Sequence: Synthetic oligonucleotide"
auuuugguacauggaauagtt

SEQ ID NO: 870 - DNA, 21 bp, Artificial Sequence
  source: /note="Description of Combined DNA/RNA Molecule: Synthetic oligonucleotide"
  source: /note="Description of Artificial Sequence: Synthetic oligonucleotide"
cuauuccauguaccaaaautt

SEQ ID NO: 871 - DNA, 21 bp, Artificial Sequence
  source: /note="Description of Combined DNA/RNA Molecule: Synthetic oligonucleotide"
  source: /note="Description of Artificial Sequence: Synthetic oligonucleotide"
agugcugaauagggaggaatt

SEQ ID NO: 872 - DNA, 21 bp, Artificial Sequence
  source: /note="Description of Combined DNA/RNA Molecule: Synthetic oligonucleotide"
  source: /note="Description of Artificial Sequence: Synthetic oligonucleotide"
uuccucccuauucagcacutt

SEQ ID NO: 873 - DNA, 21 bp, Artificial Sequence
  source: /note="Description of Combined DNA/RNA Molecule: Synthetic oligonucleotide"
  source: /note="Description of Artificial Sequence: Synthetic oligonucleotide"
gaggccagggaaauucccutt

SEQ ID NO: 874 - DNA, 21 bp, Artificial Sequence
  source: /note="Description of Combined DNA/RNA Molecule: Synthetic oligonucleotide"
  source: /note="Description of Artificial Sequence: Synthetic oligonucleotide"
agggaauuucccuggccuctt

SEQ ID NO: 875 - DNA, 21 bp, Artificial Sequence
  source: /note="Description of Combined DNA/RNA Molecule: Synthetic oligonucleotide"
  source: /note="Description of Artificial Sequence: Synthetic oligonucleotide"
agcucaaauuuuauauaagtt

SEQ ID NO: 876 - DNA, 21 bp, Artificial Sequence
  source: /note="Description of Combined DNA/RNA Molecule: Synthetic oligonucleotide"
  source: /note="Description of Artificial Sequence: Synthetic oligonucleotide"
cuuauauaaaauuugagcutt

SEQ ID NO: 877 - DNA, 21 bp, Artificial Sequence
  source: /note="Description of Combined DNA/RNA Molecule: Synthetic oligonucleotide"
  source: /note="Description of Artificial Sequence: Synthetic oligonucleotide"
cagggaaauucccuuguuutt

SEQ ID NO: 878 - DNA, 21 bp, Artificial Sequence
  source: /note="Description of Combined DNA/RNA Molecule: Synthetic oligonucleotide"
  source: /note="Description of Artificial Sequence: Synthetic oligonucleotide"
aaacaagggaauuucccugtt

SEQ ID NO: 879 - DNA, 21 bp, Artificial Sequence
  source: /note="Description of Combined DNA/RNA Molecule: Synthetic oligonucleotide"
  source: /note="Description of Artificial Sequence: Synthetic oligonucleotide"
uugugcaguggaaagaaagtt

SEQ ID NO: 880 - DNA, 21 bp, Artificial Sequence
  source: /note="Description of Combined DNA/RNA Molecule: Synthetic oligonucleotide"
  source: /note="Description of Artificial Sequence: Synthetic oligonucleotide"
cuuucuuuccacugcacaatt

SEQ ID NO: 881 - DNA, 21 bp, Artificial Sequence
  source: /note="Description of Combined DNA/RNA Molecule: Synthetic oligonucleotide"
  source: /note="Description of Artificial Sequence: Synthetic oligonucleotide"
uacauggaauaguucagagtt

SEQ ID NO: 882 - DNA, 21 bp, Artificial Sequence
  source: /note="Description of Combined DNA/RNA Molecule: Synthetic oligonucleotide"
  source: /note="Description of Artificial Sequence: Synthetic oligonucleotide"
cucugaacuauuccauguatt

SEQ ID NO: 883 - DNA, 21 bp, Artificial Sequence
  source: /note="Description of Combined DNA/RNA Molecule: Synthetic oligonucleotide"
  source: /note="Description of Artificial Sequence: Synthetic oligonucleotide"
guacauggaauaguucagatt

SEQ ID NO: 884 - DNA, 21 bp, Artificial Sequence
  source: /note="Description of Combined DNA/RNA Molecule: Synthetic oligonucleotide"
  source: /note="Description of Artificial Sequence: Synthetic oligonucleotide"
ucugaacuauuccauguactt

SEQ ID NO: 885 - DNA, 21 bp, Artificial Sequence
  source: /note="Description of Combined DNA/RNA Molecule: Synthetic oligonucleotide"
  source: /note="Description of Artificial Sequence: Synthetic oligonucleotide"
agggaaauucccuuguuuutt

SEQ ID NO: 886 - DNA, 21 bp, Artificial Sequence
  source: /note="Description of Combined DNA/RNA Molecule: Synthetic oligonucleotide"
  source: /note="Description of Artificial Sequence: Synthetic oligonucleotide"
aaaacaagggaauuucccutt

SEQ ID NO: 887 - DNA, 21 bp, Artificial Sequence
  source: /note="Description of Combined DNA/RNA Molecule: Synthetic oligonucleotide"
  source: /note="Description of Artificial Sequence: Synthetic oligonucleotide"
ggaggccagggaaauuccctt

SEQ ID NO: 888 - DNA, 21 bp, Artificial Sequence
  source: /note="Description of Combined DNA/RNA Molecule: Synthetic oligonucleotide"
  source: /note="Description of Artificial Sequence: Synthetic oligonucleotide"
gggaauuucccuggccucctt

SEQ ID NO: 889 - DNA, 21 bp, Artificial Sequence
  source: /note="Description of Combined DNA/RNA Molecule: Synthetic oligonucleotide"
  source: /note="Description of Artificial Sequence: Synthetic oligonucleotide"
guguagacagccauaugcatt

SEQ ID NO: 890 - DNA, 21 bp, Artificial Sequence
  source: /note="Description of Combined DNA/RNA Molecule: Synthetic oligonucleotide"
  source: /note="Description of Artificial Sequence: Synthetic oligonucleotide"
ugcauauggcugucuacactt

SEQ ID NO: 891 - DNA, 21 bp, Artificial Sequence
  source: /note="Description of Combined DNA/RNA Molecule: Synthetic oligonucleotide"
  source: /note="Description of Artificial Sequence: Synthetic oligonucleotide"
guagacagccauaugcagutt

SEQ ID NO: 892 - DNA, 21 bp, Artificial Sequence
  source: /note="Description of Combined DNA/RNA Molecule: Synthetic oligonucleotide"
  source: /note="Description of Artificial Sequence: Synthetic oligonucleotide"
acugcauauggcugucuactt

SEQ ID NO: 893 - DNA, 21 bp, Artificial Sequence
  source: /note="Description of Combined DNA/RNA Molecule: Synthetic oligonucleotide"
  source: /note="Description of Artificial Sequence: Synthetic oligonucleotide"
gaagaccuguuuugccaugtt

SEQ ID NO: 894 - DNA, 21 bp, Artificial Sequence
  source: /note="Description of Combined DNA/RNA Molecule: Synthetic oligonucleotide"
  source: /note="Description of Artificial Sequence: Synthetic oligonucleotide"
cauggcaaaacaggucuuctt

SEQ ID NO: 895 - DNA, 21 bp, Artificial Sequence
  source: /note="Description of Combined DNA/RNA Molecule: Synthetic oligonucleotide"
  source: /note="Description of Artificial Sequence: Synthetic oligonucleotide"
agugggaugaagaccuguutt

SEQ ID NO: 896 - DNA, 21 bp, Artificial Sequence
  source: /note="Description of Combined DNA/RNA Molecule: Synthetic oligonucleotide"
  source: /note="Description of Artificial Sequence: Synthetic oligonucleotide"
aacaggucuucaucccacutt

SEQ ID NO: 897 - DNA, 21 bp, Artificial Sequence
  source: /note="Description of Combined DNA/RNA Molecule: Synthetic oligonucleotide"
  source: /note="Description of Artificial Sequence: Synthetic oligonucleotide"
ugaagaccuguuuugccautt

SEQ ID NO: 898 - DNA, 21 bp, Artificial Sequence
  source: /note="Description of Combined DNA/RNA Molecule: Synthetic oligonucleotide"
  source: /note="Description of Artificial Sequence: Synthetic oligonucleotide"
auggcaaaacaggucuucatt

SEQ ID NO: 899 - DNA, 21 bp, Artificial Sequence
  source: /note="Description of Combined DNA/RNA Molecule: Synthetic oligonucleotide"
  source: /note="Description of Artificial Sequence: Synthetic oligonucleotide"
ugggaugaagaccuguuuutt

SEQ ID NO: 900 - DNA, 21 bp, Artificial Sequence
  source: /note="Description of Combined DNA/RNA Molecule: Synthetic oligonucleotide"
  source: /note="Description of Artificial Sequence: Synthetic oligonucleotide"
aaaacaggucuucaucccatt

SEQ ID NO: 901 - DNA, 21 bp, Artificial Sequence
  source: /note="Description of Combined DNA/RNA Molecule: Synthetic oligonucleotide"
  source: /note="Description of Artificial Sequence: Synthetic oligonucleotide"
cuuaacccaagaagcucuutt

SEQ ID NO: 902 - DNA, 21 bp, Artificial Sequence
  source: /note="Description of Combined DNA/RNA Molecule: Synthetic oligonucleotide"
  source: /note="Description of Artificial Sequence: Synthetic oligonucleotide"
aagagcuucuuggguuaagtt

SEQ ID NO: 903 - DNA, 21 bp, Artificial Sequence
  source: /note="Description of Combined DNA/RNA Molecule: Synthetic oligonucleotide"
  source: /note="Description of Artificial Sequence: Synthetic oligonucleotide"
auugugcaguggaaagaaatt

SEQ ID NO: 904 - DNA, 21 bp, Artificial Sequence
  source: /note="Description of Combined DNA/RNA Molecule: Synthetic oligonucleotide"
  source: /note="Description of Artificial Sequence: Synthetic oligonucleotide"
uuucuuuccacugcacaautt

SEQ ID NO: 905 - DNA, 21 bp, Artificial Sequence
  source: /note="Description of Combined DNA/RNA Molecule: Synthetic oligonucleotide"
  source: /note="Description of Artificial Sequence: Synthetic oligonucleotide"
cuuuauugcaaggaauggctt

SEQ ID NO: 906 - DNA, 21 bp, Artificial Sequence
  source: /note="Description of Combined DNA/RNA Molecule: Synthetic oligonucleotide"
  source: /note="Description of Artificial Sequence: Synthetic oligonucleotide"
gccauuccuugcaauaaagtt

SEQ ID NO: 907 - DNA, 21 bp, Artificial Sequence
  source: /note="Description of Combined DNA/RNA Molecule: Synthetic oligonucleotide"
  source: /note="Description of Artificial Sequence: Synthetic oligonucleotide"
gagcaugacuuuaacccagtt

SEQ ID NO: 908 - DNA, 21 bp, Artificial Sequence
  source: /note="Description of Combined DNA/RNA Molecule: Synthetic oligonucleotide"
  source: /note="Description of Artificial Sequence: Synthetic oligonucleotide"
cuggguuaaagucaugcuctt

SEQ ID NO: 909 - DNA, 21 bp, Artificial Sequence
  source: /note="Description of Combined DNA/RNA Molecule: Synthetic oligonucleotide"
  source: /note="Description of Artificial Sequence: Synthetic oligonucleotide"
gugauuuuccuccuaauuctt

SEQ ID NO: 910 - DNA, 21 bp, Artificial Sequence
  source: /note="Description of Combined DNA/RNA Molecule: Synthetic oligonucleotide"
  source: /note="Description of Artificial Sequence: Synthetic oligonucleotide"
gaauuaggaggaaaaucactt

SEQ ID NO: 911 - DNA, 21 bp, Artificial Sequence
  source: /note="Description of Combined DNA/RNA Molecule: Synthetic oligonucleotide"
  source: /note="Description of Artificial Sequence: Synthetic oligonucleotide"
ugauugcuucagacaauggtt

SEQ ID NO: 912 - DNA, 21 bp, Artificial Sequence
  source: /note="Description of Combined DNA/RNA Molecule: Synthetic oligonucleotide"
  source: /note="Description of Artificial Sequence: Synthetic oligonucleotide"
ccauugucugaagcaaucatt

SEQ ID NO: 913 - DNA, 21 bp, Artificial Sequence
  source: /note="Description of Combined DNA/RNA Molecule: Synthetic oligonucleotide"
  source: /note="Description of Artificial Sequence: Synthetic oligonucleotide"
aagcucaaauuuuauauaatt

SEQ ID NO: 914 - DNA, 21 bp, Artificial Sequence
  source: /note="Description of Combined DNA/RNA Molecule: Synthetic oligonucleotide"
  source: /note="Description of Artificial Sequence: Synthetic oligonucleotide"
uuauauaaaauuugagcuutt

SEQ ID NO: 915 - DNA, 21 bp, Artificial Sequence
  source: /note="Description of Combined DNA/RNA Molecule: Synthetic oligonucleotide"
  source: /note="Description of Artificial Sequence: Synthetic oligonucleotide"
cuggacauggaucaagcactt

SEQ ID NO: 916 - DNA, 21 bp, Artificial Sequence
  source: /note="Description of Combined DNA/RNA Molecule: Synthetic oligonucleotide"
  source: /note="Description of Artificial Sequence: Synthetic oligonucleotide"
gugcuugauccauguccagtt

SEQ ID NO: 917 - DNA, 21 bp, Artificial Sequence
  source: /note="Description of Combined DNA/RNA Molecule: Synthetic oligonucleotide"
  source: /note="Description of Artificial Sequence: Synthetic oligonucleotide"
ucaaauuuuauauaagaaatt

SEQ ID NO: 918 - DNA, 21 bp, Artificial Sequence
  source: /note="Description of Combined DNA/RNA Molecule: Synthetic oligonucleotide"
  source: /note="Description of Artificial Sequence: Synthetic oligonucleotide"
uuucuuauauaaaauuugatt

SEQ ID NO: 919 - DNA, 21 bp, Artificial Sequence
  source: /note="Description of Combined DNA/RNA Molecule: Synthetic oligonucleotide"
  source: /note="Description of Artificial Sequence: Synthetic oligonucleotide"
ugugcaguggaaagaaaggtt

SEQ ID NO: 920 - DNA, 21 bp, Artificial Sequence
  source: /note="Description of Combined DNA/RNA Molecule: Synthetic oligonucleotide"
  source: /note="Description of Artificial Sequence: Synthetic oligonucleotide"
ccuuucuuuccacugcacatt

SEQ ID NO: 921 - DNA, 21 bp, Artificial Sequence
  source: /note="Description of Combined DNA/RNA Molecule: Synthetic oligonucleotide"
  source: /note="Description of Artificial Sequence: Synthetic oligonucleotide"
uugguacauggaauaguuctt

SEQ ID NO: 922 - DNA, 21 bp, Artificial Sequence
  source: /note="Description of Combined DNA/RNA Molecule: Synthetic oligonucleotide"
  source: /note="Description of Artificial Sequence: Synthetic oligonucleotide"
gaacuauuccauguaccaatt

SEQ ID NO: 923 - DNA, 21 bp, Artificial Sequence
  source: /note="Description of Combined DNA/RNA Molecule: Synthetic oligonucleotide"
  source: /note="Description of Artificial Sequence: Synthetic oligonucleotide"
aagugggaugaagaccugutt

SEQ ID NO: 924 - DNA, 21 bp, Artificial Sequence
  source: /note="Description of Combined DNA/RNA Molecule: Synthetic oligonucleotide"
  source: /note="Description of Artificial Sequence: Synthetic oligonucleotide"
acaggucuucaucccacuutt

SEQ ID NO: 925 - DNA, 21 bp, Artificial Sequence
  source: /note="Description of Combined DNA/RNA Molecule: Synthetic oligonucleotide"
  source: /note="Description of Artificial Sequence: Synthetic oligonucleotide"
ggaugaagaccuguuuugctt

SEQ ID NO: 926 - DNA, 21 bp, Artificial Sequence
  source: /note="Description of Combined DNA/RNA Molecule: Synthetic oligonucleotide"
  source: /note="Description of Artificial Sequence: Synthetic oligonucleotide"
gcaaaacaggucuucaucctt

SEQ ID NO: 927 - DNA, 21 bp, Artificial Sequence
  source: /note="Description of Combined DNA/RNA Molecule: Synthetic oligonucleotide"
  source: /note="Description of Artificial Sequence: Synthetic oligonucleotide"
ucuggacauggaucaagcatt

SEQ ID NO: 928 - DNA, 21 bp, Artificial Sequence
  source: /note="Description of Combined DNA/RNA Molecule: Synthetic oligonucleotide"
  source: /note="Description of Artificial Sequence: Synthetic oligonucleotide"
ugcuugauccauguccagatt

SEQ ID NO: 929 - DNA, 21 bp, Artificial Sequence
  source: /note="Description of Combined DNA/RNA Molecule: Synthetic oligonucleotide"
  source: /note="Description of Artificial Sequence: Synthetic oligonucleotide"
uuugguacauggaauaguutt

SEQ ID NO: 930 - DNA, 21 bp, Artificial Sequence
  source: /note="Description of Combined DNA/RNA Molecule: Synthetic oligonucleotide"
  source: /note="Description of Artificial Sequence: Synthetic oligonucleotide"
aacuauuccauguaccaaatt

SEQ ID NO: 931 - DNA, 1202 bp, Artificial Sequence
  source: /note="Description of Artificial Sequence: Synthetic polynucleotide"
ctcgagacttttagggttgtacgggactgtaacacctgctcttgaagcatatgaagatggccccaacaaaaagaaaaggagaaaggaaggaccccgtgcaagttccaaaacttcttataagaggaggagtagaagttctagaagttaaaactggggttgactcaattacagaggtagaatgctttttaactccagaaatgggtgacccagatgagcatcttaggggttttagtaagtcaatttctatatcagatacatttgaaagtgactccccaaataaggacatgcttccttgttacagtgtggccagaattccactacccaatctaaatgaggatctaacctgtggaaatatactaatgtgggaggctgtgaccttaaaaactgaggttctaggggtgacaactttgatgaatgtgcactctaatggtcaagcaactcatgacaatggtgcaggaaagccagtgcagggcaccagctttcattttttttctgttggcggggaggctttagaattacagggggtggtttttaattacagaacaaagtacccagatggaacaatttttccaaagaatgcaacagtgcaatctcaagtaatgaacacagagcacaaggcgtacctagataagaacaaagcatatcctgttgaatgttgggttcctgatcccaccagaaatgaaaacacaagatattttgggacactaacaggaggagaaaatgttcctccagttcttcatataacaaacactgccacaacagtgctgcttgatgaatttggtgttgggccactttgcaaaggtgacaacttgtatttgtcagctgttgatgtttgtggaatgtttactaacagatctggttcccagcagtggagaggactgtccagatattttaaggttcagctcagaaaaaggagggttaaaaacccctacccaatttctttccttcttactgatttgattaacagaaggacccctagagttgatgggcaacctatgtatggtatggatgctcaggtagaggaggttagagtttttgaggggacagaggaacttccaggggacccagacatgatgagatatgttgacagatatggacagttgcaaacaaagatgctgtaatcaaaatcctttattgtaatatgcagtacattttaataaagtataaccagctttactttacagttgcagtcatgcggccgc

SEQ ID NO: 932 - DNA, 2479 bp, Artificial Sequence
  source: /note="Description of Artificial Sequence: Synthetic polynucleotide"
ctcgagccgcctccaagcttactcagaagtagtaagggcgtggaggctttttaggaggccagggaaattcccttgtttttcccttttttgcagtaattttttgctgcaaaaagctaaaatggacaaagtgctgaatagggaggaatccatggagcttatggatttattaggccttgataggtctgcatgggggaacattcctgtcatgagaaaagcttatctgaaaaaatgcaaagaactccaccctgataaaggtggggacgaagacaagatgaagagaatgaattttttatataaaaaaatggaacaaggtgtaaaagttgctcatcagcctgattttggtacatggaatagttcagaggttggttgtgattttcctcctaattctgataccctttattgcaaggaatggcctaactgtgccactaatccttcagtgcattgcccctgtttaatgtgcatgctaaaattaaggcatagaaacagaaaatttttaagaagcagcccacttgtgtggatagattgctattgctttgattgcttcagacaatggtttgggtgtgacttaacccaagaagctcttcattgctgggagaaagttcttggagacaccccctacagggatctaaagctttaagtgccaacctatggaacagatgaatgggaatcctggtggaatacatttaatgagaagtgggatgaagacctgttttgccatgaagaaatgtttgccagtgatgatgaaaacacaggatcccaacactctaccccacctaaaaagaaaaaaaaggtagaagaccctaaagactttcctgtagatctgcatgcattcctcagtcaagctgtgtttagtaatagaactgttgcttcttttgctgtgtataccactaaagaaaaagctcaaattttatataagaaacttatggaaaaatattctgtaacttttataagtagacatggttttgggggtcataatattttgtttttcttaacaccacatagacatagagtgtcagcaattaataactactgtcaaaaactatgtacctttagttttttaatttgtaaaggtgtgaataaggaatacttgttttatagtgccctgtgtagacagccatatgcagtagtggaagaaagtattcaggggggccttaaggagcatgactttaacccagaagaaccagaagaaactaagcaggtttcatggaaattagttacacagtatgccttggaaaccaagtgtgaggatgtttttttgcttatgggcatgtacttagactttcaggaaaacccacagcaatgcaaaaaatgtgaaaaaaaggatcagccaaatcactttaaccatcatgaaaaacactattataatgcccaaatttttgcagatagcaaaaatcaaaaaagcatttgccagcaggctgttgatactgtagcagccaaacaaagggttgacagcatccacatgaccagagaagaaatgttagttgaaaggtttaatttcttgcttgataaaatggacttaatttttggggcacatggcaatgctgttttagagcaatatatggctggggtggcctggattcattgcttgctgcctcaaatggacactgttatttatgactttctaaaatgcattgtattaaacattccaaaaaaaaggtactggctattcaaggggccaatagacagtggcaaaactactttagctgcagctttacttgatctctgtgggggaaagtcattaaatgttaatatgccattagaaagattaaactttgaattaggagtgggtatagatcagtttatggttgtatttgaggatgtaaaaggcactggtgcagagtcaagggatttaccttcagggcatggcataagcaaccttgattgcttaagagattacttagatggaagtgtaaaagttaatttagagagaaaacaccaaaacaaaagaacacaggtgtttccacctggaattgtaaccatgaatgaatattcagtgcctagaactttacaggccagatttgtaaggcagatagattttagaccaaaggcctacctgagaaaatcactaagctgctctgagtatttgctagaaaaaaggattttgcaaagtggtatgactttgcttttgcttttaatctggtttaggccagttgctgactttgcagctgccattcatgagaggattgtgcagtggaaagaaaggctggatttagaaataagcatgtatacattttctactatgaaagctaatgttggtatggggagacccattcttgactttcctagagaggaagattctgaagcagaagactctggacatggatcaagcactgaatcacaatcacaatgcttttcccaggtctcagaagcctctggtgcagacacacaggaaaactgcacttttcacatctgtaaaggctttcaatgtttcaaaaaaccaaagacccctcccccaaaataactgcaactgtgcggccgc

SEQ ID NO: 933 - DNA, 708 bp, Artificial Sequence
  source: /note="Description of Artificial Sequence: Synthetic polynucleotide"
ctcgagcagctaacagccagtaaacaaagcacaaggggaagtggaaagcagccaagggaacatgttttgcgagccagagctgttttggcttgtcaccagctggccatggttcttcgccagctgtcacgtaaggcttctgtgaaagttagtaaaacctggagtggaactaaaaaaagagctcaaaggattttaatttttttgttagaatttttgctggacttttgcacaggtgaagacagtgtagacgggaaaaaaagacagagacacagtggtttgactgagcagacatacagtgctttgcctgaaccaaaagctacataggtaagtaatgtttttttttgtgttttcaggttcatgggtgccgcacttgcacttttgggggacctagttgctactgtttctgaggctgctgctgccacaggattttcagtagctgaaattgctgctggagaggctgctgctactatagaagttgaaattgcatcccttgctactgtagaggggattacaagtacctctgaggctatagctgctataggccttactcctgaaacatatgctgtaataactggagctccgggggctgtagctgggtttgctgcattggttcaaactgtaactggtggtagtgctattgctcagttgggatatagattttttgctgactgggatcataaagtttcaacagttgggctttttcgcggccgc

SEQ ID NO: 934 - DNA, 738 bp, Artificial Sequence
  source: /note="Description of Artificial Sequence: Synthetic polynucleotide"
ctcgagagcagccagctatggctttacaattatttaatccagaagactactatgatattttatttcctggagtgaatgcctttgttaacaatattcactatttagatcctagacattggggcccgtccttgttctccacaatctcccaggctttttggaatcttgttagagatgatttgccagccttaacctctcaggaaattcagagaagaacccaaaaactatttgttgaaagtttagcaaggtttttggaagaaactacttgggcaatagttaattcaccagctaacttatataattatatttcagactattattctagattgtctccagttaggccctctatggtaaggcaagttgcccaaagggagggaacctatatttcttttggccactcatacacccaaagtatagatgatgcagacagcattcaagaagttacccaaaggctagatttaaaaaccccaaatgtgcaatctggtgaatttatagaaagaagtattgcaccaggaggtgcaaatcaaagatctgctcctcaatggatgttgcctttacttttagggttgtacgggactgtaacacctgctcttgaagcatatgaagatggccccaacaaaaagaaaaggagaaaggaaggaccccgtgcaagttccaaaacttcttataagaggaggagtagaagttctagaagttaaaactggggttgactcaattacagaggtagaatgctgcggccgc

SEQ ID NO: 935 - RNA, 19 nt, JC polyomavirus
cuuauaagaggaggaguag

SEQ ID NO: 936 - RNA, 19 nt, JC polyomavirus
cuacuccuccucuuauaag

SEQ ID NO: 937 - RNA, 19 nt, JC polyomavirus
caugcuuccuuguuacagu

SEQ ID NO: 938 - RNA, 19 nt, JC polyomavirus
acuguaacaaggaagcaug

SEQ ID NO: 939 - RNA, 19 nt, JC polyomavirus
uacgggacuguaacaccug

SEQ ID NO: 940 - RNA, 19 nt, JC polyomavirus
cagguguuacagucccgua

SEQ ID NO: 941 - RNA, 19 nt, JC polyomavirus
ugcuuccuuguuacagugu

SEQ ID NO: 942 - RNA, 19 nt, JC polyomavirus
acacuguaacaaggaagca

SEQ ID NO: 943 - RNA, 19 nt, JC polyomavirus
ccuguugaauguuggguuc

SEQ ID NO: 944 - RNA, 19 nt, JC polyomavirus
gaacccaacauucaacagg

SEQ ID NO: 945 - RNA, 19 nt, JC polyomavirus
guugaauguuggguuccug

SEQ ID NO: 946 - RNA, 19 nt, JC polyomavirus
caggaacccaacauucaac

SEQ ID NO: 947 - RNA, 19 nt, JC polyomavirus
aauguuggguuccugaucc

SEQ ID NO: 948 - RNA, 19 nt, JC polyomavirus
ggaucaggaacccaacauu

SEQ ID NO: 949 - RNA, 19 nt, JC polyomavirus
acacuaacaggaggagaaa

SEQ ID NO: 950 - RNA, 19 nt, JC polyomavirus
uuucuccuccuguuagugu

SEQ ID NO: 951 - RNA, 19 nt, JC polyomavirus
uauaagaggaggaguagaa

SEQ ID NO: 952 - RNA, 19 nt, JC polyomavirus
uucuacuccuccucuuaua

SEQ ID NO: 953 - RNA, 19 nt, JC polyomavirus
auaagaggaggaguagaag

SEQ ID NO: 954 - RNA, 19 nt, JC polyomavirus
cuucuacuccuccucuuau

SEQ ID NO: 955 - RNA, 19 nt, JC polyomavirus
acuguaacaccugcucuug

SEQ ID NO: 956 - RNA, 19 nt, JC polyomavirus
caagagcagguguuacagu

SEQ ID NO: 957 - RNA, 19 nt, JC polyomavirus
ggacaugcuuccuuguuac

SEQ ID NO: 958 - RNA, 19 nt, JC polyomavirus
guaacaaggaagcaugucc

SEQ ID NO: 959 - RNA, 19 nt, JC polyomavirus
acaugcuuccuuguuacag

SEQ ID NO: 960 - RNA, 19 nt, JC polyomavirus
cuguaacaaggaagcaugu

SEQ ID NO: 961 - RNA, 19 nt, JC polyomavirus
augcuuccuuguuacagug

SEQ ID NO: 962 - RNA, 19 nt, JC polyomavirus
cacuguaacaaggaagcau

SEQ ID NO: 963 - RNA, 19 nt, JC polyomavirus
cuguugaauguuggguucc

SEQ ID NO: 964 - RNA, 19 nt, JC polyomavirus
ggaacccaacauucaacag

SEQ ID NO: 965 - RNA, 19 nt, JC polyomavirus
gaauguuggguuccugauc

SEQ ID NO: 966 - RNA, 19 nt, JC polyomavirus
gaucaggaacccaacauuc

SEQ ID NO: 967 - RNA, 19 nt, JC polyomavirus
cgggacuguaacaccugcu

SEQ ID NO: 968 - RNA, 19 nt, JC polyomavirus
agcagguguuacagucccg

SEQ ID NO: 969 - RNA, 19 nt, JC polyomavirus
ggacuguaacaccugcucu

SEQ ID NO: 970 - RNA, 19 nt, JC polyomavirus
agagcagguguuacagucc

SEQ ID NO: 971 - RNA, 19 nt, JC polyomavirus
gacuguaacaccugcucuu

SEQ ID NO: 972 - RNA, 19 nt, JC polyomavirus
aagagcagguguuacaguc

SEQ ID NO: 973 - RNA, 19 nt, JC polyomavirus
cuccagaaaugggugaccc

SEQ ID NO: 974 - RNA, 19 nt, JC polyomavirus
gggucacccauuucuggag

SEQ ID NO: 975 - RNA, 19 nt, JC polyomavirus
uaagaggaggaguagaagu

SEQ ID NO: 976 - RNA, 19 nt, JC polyomavirus
acuucuacuccuccucuua

SEQ ID NO: 977 - RNA, 19 nt, JC polyomavirus
gaggcugcugcuacuauag

SEQ ID NO: 978 - RNA, 19 nt, JC polyomavirus
cuauaguagcagcagccuc

SEQ ID NO: 979 - RNA, 19 nt, JC polyomavirus
auugcaucccuugcuacug

SEQ ID NO: 980 - RNA, 19 nt, JC polyomavirus
caguagcaagggaugcaau

SEQ ID NO: 981 - RNA, 19 nt, JC polyomavirus
ugcaucccuugcuacugua

SEQ ID NO: 982 - RNA, 19 nt, JC polyomavirus
uacaguagcaagggaugca

SEQ ID NO: 983 - RNA, 19 nt, JC polyomavirus
uuguguuuucagguucaug

SEQ ID NO: 984 - RNA, 19 nt, JC polyomavirus
caugaaccugaaaacacaa

SEQ ID NO: 985 - RNA, 19 nt, JC polyomavirus
ggaccuaguugcuacuguu

SEQ ID NO: 986 - RNA, 19 nt, JC polyomavirus
aacaguagcaacuaggucc

SEQ ID NO: 987 - RNA, 19 nt, JC polyomavirus
cugccacaggauuuucagu

SEQ ID NO: 988 - RNA, 19 nt, JC polyomavirus
acugaaaauccuguggcag

SEQ ID NO: 989 - RNA, 19 nt, JC polyomavirus
gcuacuauagaaguugaaa

SEQ ID NO: 990 - RNA, 19 nt, JC polyomavirus
uuucaacuucuauaguagc

SEQ ID NO: 991 - RNA, 19 nt, JC polyomavirus
aauugcaucccuugcuacu

SEQ ID NO: 992 - RNA, 19 nt, JC polyomavirus
aguagcaagggaugcaauu

SEQ ID NO: 993 - RNA, 19 nt, JC polyomavirus
accuaguugcuacuguuuc

SEQ ID NO: 994 - RNA, 19 nt, JC polyomavirus
gaaacaguagcaacuaggu

SEQ ID NO: 995 - RNA, 19 nt, JC polyomavirus
cuacuauagaaguugaaau

SEQ ID NO: 996 - RNA, 19 nt, JC polyomavirus
auuucaacuucuauaguag

SEQ ID NO: 997 - RNA, 19 nt, JC polyomavirus
aggccuuacuccugaaaca

SEQ ID NO: 998 - RNA, 19 nt, JC polyomavirus
uguuucaggaguaaggccu

SEQ ID NO: 999 - RNA, 19 nt, JC polyomavirus
ggccuuacuccugaaacau

SEQ ID NO: 1000 - RNA, 19 nt, JC polyomavirus
auguuucaggaguaaggcc

SEQ ID NO: 1001 - RNA, 19 nt, JC polyomavirus
guaaaaccuggaguggaac

SEQ ID NO: 1002 - RNA, 19 nt, JC polyomavirus
guuccacuccagguuuuac

SEQ ID NO: 1003 - RNA, 19 nt, JC polyomavirus
uguguuuucagguucaugg

SEQ ID NO: 1004 - RNA, 19 nt, JC polyomavirus
ccaugaaccugaaaacaca

SEQ ID NO: 1005 - RNA, 19 nt, JC polyomavirus
uguuuucagguucaugggu

SEQ ID NO: 1006 - RNA, 19 nt, JC polyomavirus
acccaugaaccugaaaaca

SEQ ID NO: 1007 - RNA, 19 nt, JC polyomavirus
aucccuugcuacuguagag

SEQ ID NO: 1008 - RNA, 19 nt, JC polyomavirus
cucuacaguagcaagggau

SEQ ID NO: 1009 - RNA, 19 nt, JC polyomavirus
gaccuaguugcuacuguuu

SEQ ID NO: 1010 - RNA, 19 nt, JC polyomavirus
aaacaguagcaacuagguc

SEQ ID NO: 1011 - RNA, 19 nt, JC polyomavirus
ggauuacaaguaccucuga

SEQ ID NO: 1012 - RNA, 19 nt, JC polyomavirus
ucagagguacuuguaaucc

SEQ ID NO: 1013 - RNA, 19 nt, JC polyomavirus
uaggccuuacuccugaaac

SEQ ID NO: 1014 - RNA, 19 nt, JC polyomavirus
guuucaggaguaaggccua

SEQ ID NO: 1015 - RNA, 19 nt, JC polyomavirus
uguuagaauuuuugcugga

SEQ ID NO: 1016 - RNA, 19 nt, JC polyomavirus
uccagcaaaaauucuaaca

SEQ ID NO: 1017 - RNA, 19 nt, JC polyomavirus
ugcugccacaggauuuuca

SEQ ID NO: 1018 - RNA, 19 nt, JC polyomavirus
ugaaaauccuguggcagca

SEQ ID NO: 1019 - RNA, 19 nt, JC polyomavirus
ccacaggauuuucaguagc

SEQ ID NO: 1020 - RNA, 19 nt, JC polyomavirus
gcuacugaaaauccugugg

SEQ ID NO: 1021 - RNA, 19 nt, JC polyomavirus
aaguugaaauugcaucccu

SEQ ID NO: 1022 - RNA, 19 nt, JC polyomavirus
agggaugcaauuucaacuu

SEQ ID NO: 1023 - RNA, 19 nt, JC polyomavirus
aguugaaauugcaucccuu

SEQ ID NO: 1024 - RNA, 19 nt, JC polyomavirus
aagggaugcaauuucaacu

SEQ ID NO: 1025 - RNA, 19 nt, JC polyomavirus
gcugcugccacaggauuuu

SEQ ID NO: 1026 - RNA, 19 nt, JC polyomavirus
aaaauccuguggcagcagc

SEQ ID NO: 1027 - RNA, 19 nt, JC polyomavirus
aguaaaaccuggaguggaa

SEQ ID NO: 1028 - RNA, 19 nt, JC polyomavirus
uuccacuccagguuuuacu

SEQ ID NO: 1029 - RNA, 19 nt, JC polyomavirus
uuuuguguuuucagguuca

SEQ ID NO: 1030 - RNA, 19 nt, JC polyomavirus
ugaaccugaaaacacaaaa

SEQ ID NO: 1031 - RNA, 19 nt, JC polyomavirus
uuuguguuuucagguucau

SEQ ID NO: 1032 - RNA, 19 nt, JC polyomavirus
augaaccugaaaacacaaa

SEQ ID NO: 1033 - RNA, 19 nt, JC polyomavirus
guguuuucagguucauggg

SEQ ID NO: 1034 - RNA, 19 nt, JC polyomavirus
cccaugaaccugaaaacac

SEQ ID NO: 1035 - RNA, 19 nt, JC polyomavirus
guuuucagguucaugggug

SEQ ID NO: 1036 - RNA, 19 nt, JC polyomavirus
cacccaugaaccugaaaac

SEQ ID NO: 1037 - RNA, 19 nt, JC polyomavirus
uuuucagguucaugggugc

SEQ ID NO: 1038 - RNA, 19 nt, JC polyomavirus
gcacccaugaaccugaaaa

SEQ ID NO: 1039 - RNA, 19 nt, JC polyomavirus
uuucagguucaugggugcc

SEQ ID NO: 1040 - RNA, 19 nt, JC polyomavirus
ggcacccaugaaccugaaa

SEQ ID NO: 1041 - RNA, 19 nt, JC polyomavirus
aauugcugcuggagaggcu

SEQ ID NO: 1042 - RNA, 19 nt, JC polyomavirus
agccucuccagcagcaauu

SEQ ID NO: 1043 - RNA, 19 nt, JC polyomavirus
uugcaucccuugcuacugu

SEQ ID NO: 1044 - RNA, 19 nt, JC polyomavirus
acaguagcaagggaugcaa

SEQ ID NO: 1045 - RNA, 19 nt, JC polyomavirus
gcuguagcuggguuugcug

SEQ ID NO: 1046 - RNA, 19 nt, JC polyomavirus
cagcaaacccagcuacagc

SEQ ID NO: 1047 - RNA, 19 nt, JC polyomavirus
uagaaguugaaauugcauc

SEQ ID NO: 1048 - RNA, 19 nt, JC polyomavirus
gaugcaauuucaacuucua

SEQ ID NO: 1049 - RNA, 19 nt, JC polyomavirus
gaaguugaaauugcauccc

SEQ ID NO: 1050 - RNA, 19 nt, JC polyomavirus
gggaugcaauuucaacuuc

SEQ ID NO: 1051 - RNA, 19 nt, JC polyomavirus
caucccuugcuacuguaga

SEQ ID NO: 1052 - RNA, 19 nt, JC polyomavirus
ucuacaguagcaagggaug

SEQ ID NO: 1053 - RNA, 19 nt, JC polyomavirus
uaguaaaaccuggagugga

SEQ ID NO: 1054 - RNA, 19 nt, JC polyomavirus
uccacuccagguuuuacua

SEQ ID NO: 1055 - RNA, 19 nt, JC polyomavirus
uuuuuuguuagaauuuuug

SEQ ID NO: 1056 - RNA, 19 nt, JC polyomavirus
caaaaauucuaacaaaaaa

SEQ ID NO: 1057 - RNA, 19 nt, JC polyomavirus
uacuauagaaguugaaauu

SEQ ID NO: 1058 - RNA, 19 nt, JC polyomavirus
aauuucaacuucuauagua

SEQ ID NO: 1059 - RNA, 19 nt, JC polyomavirus
ccuaguugcuacuguuucu

SEQ ID NO: 1060 - RNA, 19 nt, JC polyomavirus
agaaacaguagcaacuagg

SEQ ID NO: 1061 - RNA, 19 nt, JC polyomavirus
cuaguugcuacuguuucug

SEQ ID NO: 1062 - RNA, 19 nt, JC polyomavirus
cagaaacaguagcaacuag

SEQ ID NO: 1063 - RNA, 19 nt, JC polyomavirus
guugcuacuguuucugagg

SEQ ID NO: 1064 - RNA, 19 nt, JC polyomavirus
ccucagaaacaguagcaac

SEQ ID NO: 1065 - RNA, 19 nt, JC polyomavirus
uggagaggcugcugcuacu

SEQ ID NO: 1066 - RNA, 19 nt, JC polyomavirus
aguagcagcagccucucca

SEQ ID NO: 1067 - RNA, 19 nt, JC polyomavirus
gagaggcugcugcuacuau

SEQ ID NO: 1068 - RNA, 19 nt, JC polyomavirus
auaguagcagcagccucuc

SEQ ID NO: 1069 - RNA, 19 nt, JC polyomavirus
agaggcugcugcuacuaua

SEQ ID NO: 1070 - RNA, 19 nt, JC polyomavirus
uauaguagcagcagccucu

SEQ ID NO: 1071 - RNA, 19 nt, JC polyomavirus
gcugcugcuacuauagaag

SEQ ID NO: 1072 - RNA, 19 nt, JC polyomavirus
cuucuauaguagcagcagc

SEQ ID NO: 1073 - RNA, 19 nt, JC polyomavirus
uuuuuuguguuuucagguu

SEQ ID NO: 1074 - RNA, 19 nt, JC polyomavirus
aaccugaaaacacaaaaaa

SEQ ID NO: 1075 - RNA, 19 nt, JC polyomavirus
acuauagaaguugaaauug

SEQ ID NO: 1076 - RNA, 19 nt, JC polyomavirus
caauuucaacuucuauagu

SEQ ID NO: 1077 - RNA, 19 nt, JC polyomavirus
uuaguaaaaccuggagugg

SEQ ID NO: 1078 - RNA, 19 nt, JC polyomavirus
ccacuccagguuuuacuaa

SEQ ID NO: 1079 - RNA, 19 nt, JC polyomavirus
gccuuacuccugaaacaua

SEQ ID NO: 1080 - RNA, 19 nt, JC polyomavirus
uauguuucaggaguaaggc

SEQ ID NO: 1081 - RNA, 19 nt, JC polyomavirus
agaaguugaaauugcaucc

SEQ ID NO: 1082 - RNA, 19 nt, JC polyomavirus
ggaugcaauuucaacuucu

SEQ ID NO: 1083 - RNA, 19 nt, JC polyomavirus
ugccacaggauuuucagua

SEQ ID NO: 1084 - RNA, 19 nt, JC polyomavirus
uacugaaaauccuguggca

SEQ ID NO: 1085 - RNA, 19 nt, JC polyomavirus
gcugccacaggauuuucag

SEQ ID NO: 1086 - RNA, 19 nt, JC polyomavirus
cugaaaauccuguggcagc

SEQ ID NO: 1087 - RNA, 19 nt, JC polyomavirus
cagguucaugggugccgca

SEQ ID NO: 1088 - RNA, 19 nt, JC polyomavirus
ugcggcacccaugaaccug

SEQ ID NO: 1089 - RNA, 19 nt, JC polyomavirus
aaauugcugcuggagaggc

SEQ ID NO: 1090 - RNA, 19 nt, JC polyomavirus
gccucuccagcagcaauuu

SEQ ID NO: 1091 - RNA, 19 nt, JC polyomavirus
auugcugcuggagaggcug

SEQ ID NO: 1092 - RNA, 19 nt, JC polyomavirus
cagccucuccagcagcaau

SEQ ID NO: 1093 - RNA, 19 nt, JC polyomavirus
ugaaauugcaucccuugcu

SEQ ID NO: 1094 - RNA, 19 nt, JC polyomavirus
agcaagggaugcaauuuca

SEQ ID NO: 1095 - RNA, 19 nt, JC polyomavirus
uuuuguuagaauuuuugcu

SEQ ID NO: 1096 - RNA, 19 nt, JC polyomavirus
agcaaaaauucuaacaaaa

SEQ ID NO: 1097 - RNA, 19 nt, JC polyomavirus
uuuguuagaauuuuugcug

SEQ ID NO: 1098 - RNA, 19 nt, JC polyomavirus
cagcaaaaauucuaacaaa

SEQ ID NO: 1099 - RNA, 19 nt, JC polyomavirus
ggcugcugcuacuauagaa

SEQ ID NO: 1100 - RNA, 19 nt, JC polyomavirus
uucuauaguagcagcagcc

SEQ ID NO: 1101 - RNA, 19 nt, JC polyomavirus
uuguuagaauuuuugcugg

SEQ ID NO: 1102 - RNA, 19 nt, JC polyomavirus
ccagcaaaaauucuaacaa

SEQ ID NO: 1103 - RNA, 19 nt, JC polyomavirus
uuuuuuuguguuuucaggu

SEQ ID NO: 1104 - RNA, 19 nt, JC polyomavirus
accugaaaacacaaaaaaa

SEQ ID NO: 1105 - RNA, 19 nt, JC polyomavirus
gaaacuacuugggcaauag

SEQ ID NO: 1106 - RNA, 19 nt, JC polyomavirus
cuauugcccaaguaguuuc

SEQ ID NO: 1107 - RNA, 19 nt, JC polyomavirus
aauggauguugccuuuacu

SEQ ID NO: 1108 - RNA, 19 nt, JC polyomavirus
aguaaaggcaacauccauu

SEQ ID NO: 1109 - RNA, 19 nt, JC polyomavirus
ccucaauggauguugccuu

SEQ ID NO: 1110 - RNA, 19 nt, JC polyomavirus
aaggcaacauccauugagg

SEQ ID NO: 1111 - RNA, 19 nt, JC polyomavirus
uugccuuuacuuuuagggu

SEQ ID NO: 1112 - RNA, 19 nt, JC polyomavirus
acccuaaaaguaaaggcaa

SEQ ID NO: 1113 - RNA, 19 nt, JC polyomavirus
agaaacuacuugggcaaua

SEQ ID NO: 1114 - RNA, 19 nt, JC polyomavirus
uauugcccaaguaguuucu

SEQ ID NO: 1115 - RNA, 19 nt, JC polyomavirus
aagaaacuacuugggcaau

SEQ ID NO: 1116 - RNA, 19 nt, JC polyomavirus
auugcccaaguaguuucuu

SEQ ID NO: 1117 - RNA, 19 nt, JC polyomavirus
ugccuuuacuuuuaggguu

SEQ ID NO: 1118 - RNA, 19 nt, JC polyomavirus
aacccuaaaaguaaaggca

SEQ ID NO: 1119 - RNA, 19 nt, JC polyomavirus
gccuuuacuuuuaggguug

SEQ ID NO: 1120 - RNA, 19 nt, JC polyomavirus
caacccuaaaaguaaaggc

SEQ ID NO: 1121 - RNA, 19 nt, JC polyomavirus
cuuuacuuuuaggguugua

SEQ ID NO: 1122 - RNA, 19 nt, JC polyomavirus
uacaacccuaaaaguaaag

SEQ ID NO: 1123 - RNA, 19 nt, JC polyomavirus
uuuacuuuuaggguuguac

SEQ ID NO: 1124 - RNA, 19 nt, JC polyomavirus
guacaacccuaaaaguaaa

SEQ ID NO: 1125 - RNA, 19 nt, JC polyomavirus
uacuuuuaggguuguacgg

SEQ ID NO: 1126 - RNA, 19 nt, JC polyomavirus
ccguacaacccuaaaagua

SEQ ID NO: 1127 - RNA, 19 nt, JC polyomavirus
ggaagaaacuacuugggca

SEQ ID NO: 1128 - RNA, 19 nt, JC polyomavirus
ugcccaaguaguuucuucc

SEQ ID NO: 1129 - RNA, 19 nt, JC polyomavirus
caauggauguugccuuuac

SEQ ID NO: 1130 - RNA, 19 nt, JC polyomavirus
guaaaggcaacauccauug

SEQ ID NO: 1131 - RNA, 19 nt, JC polyomavirus
ggauguugccuuuacuuuu

SEQ ID NO: 1132 - RNA, 19 nt, JC polyomavirus
aaaaguaaaggcaacaucc

SEQ ID NO: 1133 - RNA, 19 nt, JC polyomavirus
uguugccuuuacuuuuagg

SEQ ID NO: 1134 - RNA, 19 nt, JC polyomavirus
ccuaaaaguaaaggcaaca

SEQ ID NO: 1135 - RNA, 19 nt, JC polyomavirus
gauguugccuuuacuuuua

SEQ ID NO: 1136 - RNA, 19 nt, JC polyomavirus
uaaaaguaaaggcaacauc

SEQ ID NO: 1137 - RNA, 19 nt, JC polyomavirus
ccagaagacuacuaugaua

SEQ ID NO: 1138 - RNA, 19 nt, JC polyomavirus
uaucauaguagucuucugg

SEQ ID NO: 1139 - RNA, 19 nt, JC polyomavirus
uccagaagacuacuaugau

SEQ ID NO: 1140 - RNA, 19 nt, JC polyomavirus
aucauaguagucuucugga

SEQ ID NO: 1141 - RNA, 19 nt, JC polyomavirus
uuuggaagaaacuacuugg

SEQ ID NO: 1142 - RNA, 19 nt, JC polyomavirus
ccaaguaguuucuuccaaa

SEQ ID NO: 1143 - RNA, 19 nt, JC polyomavirus
cuccucaauggauguugcc

SEQ ID NO: 1144 - RNA, 19 nt, JC polyomavirus
ggcaacauccauugaggag

SEQ ID NO: 1145 - RNA, 19 nt, JC polyomavirus
ccaaaugugcaaucuggug

SEQ ID NO: 1146 - RNA, 19 nt, JC polyomavirus
caccagauugcacauuugg

SEQ ID NO: 1147 - RNA, 19 nt, JC polyomavirus
caaaugugcaaucugguga

SEQ ID NO: 1148 - RNA, 19 nt, JC polyomavirus
ucaccagauugcacauuug

SEQ ID NO: 1149 - RNA, 19 nt, JC polyomavirus
agaucugcuccucaaugga

SEQ ID NO: 1150 - RNA, 19 nt, JC polyomavirus
uccauugaggagcagaucu

SEQ ID NO: 1151 - RNA, 19 nt, JC polyomavirus
cucaauggauguugccuuu

SEQ ID NO: 1152 - RNA, 19 nt, JC polyomavirus
aaaggcaacauccauugag

SEQ ID NO: 1153 - RNA, 19 nt, JC polyomavirus
gcucaaauuuuauauaaga

SEQ ID NO: 1154 - RNA, 19 nt, JC polyomavirus
ucuuauauaaaauuugagc

SEQ ID NO: 1155 - RNA, 19 nt, JC polyomavirus
agccugauuuugguacaug

SEQ ID NO: 1156 - RNA, 19 nt, JC polyomavirus
cauguaccaaaaucaggcu

SEQ ID NO: 1157 - RNA, 19 nt, JC polyomavirus
cucaaauuuuauauaagaa

SEQ ID NO: 1158 - RNA, 19 nt, JC polyomavirus
uucuuauauaaaauuugag

SEQ ID NO: 1159 - RNA, 19 nt, JC polyomavirus
acaaagugcugaauaggga

SEQ ID NO: 1160 - RNA, 19 nt, JC polyomavirus
ucccuauucagcacuuugu

SEQ ID NO: 1161 - RNA, 19 nt, JC polyomavirus
cugauuuugguacauggaa

SEQ ID NO: 1162 - RNA, 19 nt, JC polyomavirus
uuccauguaccaaaaucag

SEQ ID NO: 1163 - RNA, 19 nt, JC polyomavirus
gauuuugguacauggaaua

SEQ ID NO: 1164 - RNA, 19 nt, JC polyomavirus
uauuccauguaccaaaauc

SEQ ID NO: 1165 - RNA, 19 nt, JC polyomavirus
cucaucagccugauuuugg

SEQ ID NO: 1166 - RNA, 19 nt, JC polyomavirus
ccaaaaucaggcugaugag

SEQ ID NO: 1167 - RNA, 19 nt, JC polyomavirus
agcccacuuguguggauag

SEQ ID NO: 1168 - RNA, 19 nt, JC polyomavirus
cuauccacacaagugggcu

SEQ ID NO: 1169 - RNA, 19 nt, JC polyomavirus
gugcugaauagggaggaau

SEQ ID NO: 1170 - RNA, 19 nt, JC polyomavirus
auuccucccuauucagcac

SEQ ID NO: 1171 - RNA, 19 nt, JC polyomavirus
aguaagggcguggaggcuu

SEQ ID NO: 1172 - RNA, 19 nt, JC polyomavirus
aagccuccacgcccuuacu

SEQ ID NO: 1173 - RNA, 19 nt, JC polyomavirus
gugacuuaacccaagaagc

SEQ ID NO: 1174 - RNA, 19 nt, JC polyomavirus
gcuucuuggguuaagucac

SEQ ID NO: 1175 - RNA, 19 nt, JC polyomavirus
uaguaagggcguggaggcu

SEQ ID NO: 1176 - RNA, 19 nt, JC polyomavirus
agccuccacgcccuuacua

SEQ ID NO: 1177 - RNA, 19 nt, JC polyomavirus
ucaucagccugauuuuggu

SEQ ID NO: 1178 - RNA, 19 nt, JC polyomavirus
accaaaaucaggcugauga

SEQ ID NO: 1179 - RNA, 19 nt, JC polyomavirus
guagaagacccuaaagacu

SEQ ID NO: 1180 - RNA, 19 nt, JC polyomavirus
agucuuuagggucuucuac

SEQ ID NO: 1181 - RNA, 19 nt, JC polyomavirus
agguagaagacccuaaaga

SEQ ID NO: 1182 - RNA, 19 nt, JC polyomavirus
ucuuuagggucuucuaccu

SEQ ID NO: 1183 - RNA, 19 nt, JC polyomavirus
aaaagguagaagacccuaa

SEQ ID NO: 1184 - RNA, 19 nt, JC polyomavirus
uuagggucuucuaccuuuu

SEQ ID NO: 1185 - RNA, 19 nt, JC polyomavirus
aaagguagaagacccuaaa

SEQ ID NO: 1186 - RNA, 19 nt, JC polyomavirus
uuuagggucuucuaccuuu

SEQ ID NO: 1187 - RNA, 19 nt, JC polyomavirus
gauugugcaguggaaagaa

SEQ ID NO: 1188 - RNA, 19 nt, JC polyomavirus
uucuuuccacugcacaauc

SEQ ID NO: 1189 - RNA, 19 nt, JC polyomavirus
ggauugugcaguggaaaga

SEQ ID NO: 1190 - RNA, 19 nt, JC polyomavirus
ucuuuccacugcacaaucc

SEQ ID NO: 1191 - RNA, 19 nt, JC polyomavirus
uguagacagccauaugcag

SEQ ID NO: 1192 - RNA, 19 nt, JC polyomavirus
cugcauauggcugucuaca

SEQ ID NO: 1193 - RNA, 19 nt, JC polyomavirus
caugacuuuaacccagaag

SEQ ID NO: 1194 - RNA, 19 nt, JC polyomavirus
cuucuggguuaaagucaug

SEQ ID NO: 1195 - RNA, 19 nt, JC polyomavirus
auagggaggaauccaugga

SEQ ID NO: 1196 - RNA, 19 nt, JC polyomavirus
uccauggauuccucccuau

SEQ ID NO: 1197 - RNA, 19 nt, JC polyomavirus
cugaauagggaggaaucca

SEQ ID NO: 1198 - RNA, 19 nt, JC polyomavirus
uggauuccucccuauucag

SEQ ID NO: 1199 - RNA, 19 nt, JC polyomavirus
aaagugcugaauagggagg

SEQ ID NO: 1200 - RNA, 19 nt, JC polyomavirus
ccucccuauucagcacuuu

SEQ ID NO: 1201 - RNA, 19 nt, JC polyomavirus
ugacuuaacccaagaagcu

SEQ ID NO: 1202 - RNA, 19 nt, JC polyomavirus
agcuucuuggguuaaguca

SEQ ID NO: 1203 - RNA, 19 nt, JC polyomavirus
augacuuuaacccagaaga

SEQ ID NO: 1204 - RNA, 19 nt, JC polyomavirus
ucuucuggguuaaagucau

SEQ ID NO: 1205 - RNA, 19 nt, JC polyomavirus
gaagacccuaaagacuuuc

SEQ ID NO: 1206 - RNA, 19 nt, JC polyomavirus
gaaagucuuuagggucuuc

SEQ ID NO: 1207 - RNA, 19 nt, JC polyomavirus
aaaaagcucaaauuuuaua

SEQ ID NO: 1208 - RNA, 19 nt, JC polyomavirus
uauaaaauuugagcuuuuu

SEQ ID NO: 1209 - RNA, 19 nt, JC polyomavirus
aucagccugauuuugguac

SEQ ID NO: 1210 - RNA, 19 nt, JC polyomavirus
guaccaaaaucaggcugau

SEQ ID NO: 1211 - RNA, 19 nt, JC polyomavirus
caucagccugauuuuggua

SEQ ID NO: 1212 - RNA, 19 nt, JC polyomavirus
uaccaaaaucaggcugaug

SEQ ID NO: 1213 - RNA, 19 nt, JC polyomavirus
auggacaaagugcugaaua

SEQ ID NO: 1214 - RNA, 19 nt, JC polyomavirus
uauucagcacuuuguccau

SEQ ID NO: 1215 - RNA, 19 nt, JC polyomavirus
uagaagacccuaaagacuu

SEQ ID NO: 1216 - RNA, 19 nt, JC polyomavirus
aagucuuuagggucuucua

SEQ ID NO: 1217 - RNA, 19 nt, JC polyomavirus
aagguagaagacccuaaag

SEQ ID NO: 1218 - RNA, 19 nt, JC polyomavirus
cuuuagggucuucuaccuu

SEQ ID NO: 1219 - RNA, 19 nt, JC polyomavirus
cagcccacuuguguggaua

SEQ ID NO: 1220 - RNA, 19 nt, JC polyomavirus
uauccacacaagugggcug

SEQ ID NO: 1221 - RNA, 19 nt, JC polyomavirus
uuuugguacauggaauagu

SEQ ID NO: 1222 - RNA, 19 nt, JC polyomavirus
acuauuccauguaccaaaa

SEQ ID NO: 1223 - RNA, 19 nt, JC polyomavirus
ugaauagggaggaauccau

SEQ ID NO: 1224 - RNA, 19 nt, JC polyomavirus
auggauuccucccuauuca

SEQ ID NO: 1225 - RNA, 19 nt, JC polyomavirus
gcugaauagggaggaaucc

SEQ ID NO: 1226 - RNA, 19 nt, JC polyomavirus
ggauuccucccuauucagc

SEQ ID NO: 1227 - RNA, 19 nt, JC polyomavirus
ugcugaauagggaggaauc

SEQ ID NO: 1228 - RNA, 19 nt, JC polyomavirus
gauuccucccuauucagca

SEQ ID NO: 1229 - RNA, 19 nt, JC polyomavirus
uguguagacagccauaugc

SEQ ID NO: 1230 - RNA, 19 nt, JC polyomavirus
gcauauggcugucuacaca

SEQ ID NO: 1231 - RNA, 19 nt, JC polyomavirus
ugcuuugauugcuucagac

SEQ ID NO: 1232 - RNA, 19 nt, JC polyomavirus
gucugaagcaaucaaagca

SEQ ID NO: 1233 - RNA, 19 nt, JC polyomavirus
uugcuuugauugcuucaga

SEQ ID NO: 1234 - RNA, 19 nt, JC polyomavirus
ucugaagcaaucaaagcaa

SEQ ID NO: 1235 - RNA, 19 nt, JC polyomavirus
auugcuuugauugcuucag

SEQ ID NO: 1236 - RNA, 19 nt, JC polyomavirus
cugaagcaaucaaagcaau

SEQ ID NO: 1237 - RNA, 19 nt, JC polyomavirus
cuauugcuuugauugcuuc

SEQ ID NO: 1238 - RNA, 19 nt, JC polyomavirus
gaagcaaucaaagcaauag

SEQ ID NO: 1239 - RNA, 19 nt, JC polyomavirus
auugcaaggaauggccuaa

SEQ ID NO: 1240 - RNA, 19 nt, JC polyomavirus
uuaggccauuccuugcaau

SEQ ID NO: 1241 - RNA, 19 nt, JC polyomavirus
auuuuccuccuaauucuga

SEQ ID NO: 1242 - RNA, 19 nt, JC polyomavirus
ucagaauuaggaggaaaau

SEQ ID NO: 1243 - RNA, 19 nt, JC polyomavirus
gcucaucagccugauuuug

SEQ ID NO: 1244 - RNA, 19 nt, JC polyomavirus
caaaaucaggcugaugagc

SEQ ID NO: 1245 - RNA, 19 nt, JC polyomavirus
ugcucaucagccugauuuu

SEQ ID NO: 1246 - RNA, 19 nt, JC polyomavirus
aaaaucaggcugaugagca

SEQ ID NO: 1247 - RNA, 19 nt, JC polyomavirus
aguugcucaucagccugau

SEQ ID NO: 1248 - RNA, 19 nt, JC polyomavirus
aucaggcugaugagcaacu

SEQ ID NO: 1249 - RNA, 19 nt, JC polyomavirus
aagggcguggaggcuuuuu

SEQ ID NO: 1250 - RNA, 19 nt, JC polyomavirus
aaaaagccuccacgcccuu

SEQ ID NO: 1251 - RNA, 19 nt, JC polyomavirus
guaagggcguggaggcuuu

SEQ ID NO: 1252 - RNA, 19 nt, JC polyomavirus
aaagccuccacgcccuuac

SEQ ID NO: 1253 - RNA, 19 nt, JC polyomavirus
gacccuaaagacuuuccug

SEQ ID NO: 1254 - RNA, 19 nt, JC polyomavirus
caggaaagucuuuaggguc

SEQ ID NO: 1255 - RNA, 19 nt, JC polyomavirus
aggagcaugacuuuaaccc

SEQ ID NO: 1256 - RNA, 19 nt, JC polyomavirus
ggguuaaagucaugcuccu

SEQ ID NO: 1257 - RNA, 19 nt, JC polyomavirus
ugugauuuuccuccuaauu

SEQ ID NO: 1258 - RNA, 19 nt, JC polyomavirus
aauuaggaggaaaaucaca

SEQ ID NO: 1259 - RNA, 19 nt, JC polyomavirus
uugugauuuuccuccuaau

SEQ ID NO: 1260 - RNA, 19 nt, JC polyomavirus
auuaggaggaaaaucacaa

SEQ ID NO: 1261 - RNA, 19 nt, JC polyomavirus
gacuuaacccaagaagcuc

SEQ ID NO: 1262 - RNA, 19 nt, JC polyomavirus
gagcuucuuggguuaaguc

SEQ ID NO: 1263 - RNA, 19 nt, JC polyomavirus
gcuucagacaaugguuugg

SEQ ID NO: 1264 - RNA, 19 nt, JC polyomavirus
ccaaaccauugucugaagc

SEQ ID NO: 1265 - RNA, 19 nt, JC polyomavirus
uugcuucagacaaugguuu

SEQ ID NO: 1266 - RNA, 19 nt, JC polyomavirus
aaaccauugucugaagcaa

SEQ ID NO: 1267 - RNA, 19 nt, JC polyomavirus
auugcuucagacaaugguu

SEQ ID NO: 1268 - RNA, 19 nt, JC polyomavirus
aaccauugucugaagcaau

SEQ ID NO: 1269 - RNA, 19 nt, JC polyomavirus
uugauugcuucagacaaug

SEQ ID NO: 1270 - RNA, 19 nt, JC polyomavirus
cauugucugaagcaaucaa

SEQ ID NO: 1271 - RNA, 19 nt, JC polyomavirus
gacaaagugcugaauaggg

SEQ ID NO: 1272 - RNA, 19 nt, JC polyomavirus
cccuauucagcacuuuguc

SEQ ID NO: 1273 - RNA, 19 nt, JC polyomavirus
aagaaaaagcucaaauuuu

SEQ ID NO: 1274 - RNA, 19 nt, JC polyomavirus
aaaauuugagcuuuuucuu

SEQ ID NO: 1275 - RNA, 19 nt, JC polyomavirus
aaagaaaaagcucaaauuu

SEQ ID NO: 1276 - RNA, 19 nt, JC polyomavirus
aaauuugagcuuuuucuuu

SEQ ID NO: 1277 - RNA, 19 nt, JC polyomavirus
agaagacccuaaagacuuu

SEQ ID NO: 1278 - RNA, 19 nt, JC polyomavirus
aaagucuuuagggucuucu

SEQ ID NO: 1279 - RNA, 19 nt, JC polyomavirus
aaaaaaaagguagaagacc

SEQ ID NO: 1280 - RNA, 19 nt, JC polyomavirus
ggucuucuaccuuuuuuuu

SEQ ID NO: 1281 - RNA, 19 nt, JC polyomavirus
gguagaagacccuaaagac

SEQ ID NO: 1282 - RNA, 19 nt, JC polyomavirus
gucuuuagggucuucuacc

SEQ ID NO: 1283 - RNA, 19 nt, JC polyomavirus
aaaaaagguagaagacccu

SEQ ID NO: 1284 - RNA, 19 nt, JC polyomavirus
agggucuucuaccuuuuuu

SEQ ID NO: 1285 - RNA, 19 nt, JC polyomavirus
aaaaagguagaagacccua

SEQ ID NO: 1286 - RNA, 19 nt, JC polyomavirus
uagggucuucuaccuuuuu

SEQ ID NO: 1287 - RNA, 19 nt, JC polyomavirus
uuaacccaagaagcucuuc

SEQ ID NO: 1288 - RNA, 19 nt, JC polyomavirus
gaagagcuucuuggguuaa

SEQ ID NO: 1289 - RNA, 19 nt, JC polyomavirus
auuuugguacauggaauag

SEQ ID NO: 1290 - RNA, 19 nt, JC polyomavirus
cuauuccauguaccaaaau

SEQ ID NO: 1291 - RNA, 19 nt, JC polyomavirus
agugcugaauagggaggaa

SEQ ID NO: 1292 - RNA, 19 nt, JC polyomavirus
uuccucccuauucagcacu

SEQ ID NO: 1293 - RNA, 19 nt, JC polyomavirus
gaggccagggaaauucccu

SEQ ID NO: 1294 - RNA, 19 nt, JC polyomavirus
agggaauuucccuggccuc

SEQ ID NO: 1295 - RNA, 19 nt, JC polyomavirus
agcucaaauuuuauauaag

SEQ ID NO: 1296 - RNA, 19 nt, JC polyomavirus
cuuauauaaaauuugagcu

SEQ ID NO: 1297 - RNA, 19 nt, JC polyomavirus
cagggaaauucccuuguuu

SEQ ID NO: 1298 - RNA, 19 nt, JC polyomavirus
aaacaagggaauuucccug

SEQ ID NO: 1299 - RNA, 19 nt, JC polyomavirus
uugugcaguggaaagaaag

SEQ ID NO: 1300 - RNA, 19 nt, JC polyomavirus
cuuucuuuccacugcacaa

SEQ ID NO: 1301 - RNA, 19 nt, JC polyomavirus
uacauggaauaguucagag

SEQ ID NO: 1302 - RNA, 19 nt, JC polyomavirus
cucugaacuauuccaugua

SEQ ID NO: 1303 - RNA, 19 nt, JC polyomavirus
guacauggaauaguucaga

SEQ ID NO: 1304 - RNA, 19 nt, JC polyomavirus
ucugaacuauuccauguac

SEQ ID NO: 1305 - RNA, 19 nt, JC polyomavirus
agggaaauucccuuguuuu

SEQ ID NO: 1306 - RNA, 19 nt, JC polyomavirus
aaaacaagggaauuucccu

SEQ ID NO: 1307 - RNA, 19 nt, JC polyomavirus
ggaggccagggaaauuccc

SEQ ID NO: 1308 - RNA, 19 nt, JC polyomavirus
gggaauuucccuggccucc

SEQ ID NO: 1309 - RNA, 19 nt, JC polyomavirus
guguagacagccauaugca

SEQ ID NO: 1310 - RNA, 19 nt, JC polyomavirus
ugcauauggcugucuacac

SEQ ID NO: 1311 - RNA, 19 nt, JC polyomavirus
guagacagccauaugcagu

SEQ ID NO: 1312 - RNA, 19 nt, JC polyomavirus
acugcauauggcugucuac

SEQ ID NO: 1313 - RNA, 19 nt, JC polyomavirus
gaagaccuguuuugccaug

SEQ ID NO: 1314 - RNA, 19 nt, JC polyomavirus
cauggcaaaacaggucuuc

SEQ ID NO: 1315 - RNA, 19 nt, JC polyomavirus
agugggaugaagaccuguu

SEQ ID NO: 1316 - RNA, 19 nt, JC polyomavirus
aacaggucuucaucccacu

SEQ ID NO: 1317 - RNA, 19 nt, JC polyomavirus
ugaagaccuguuuugccau

SEQ ID NO: 1318 - RNA, 19 nt, JC polyomavirus
auggcaaaacaggucuuca

SEQ ID NO: 1319 - RNA, 19 nt, JC polyomavirus
ugggaugaagaccuguuuu

SEQ ID NO: 1320 - RNA, 19 nt, JC polyomavirus
aaaacaggucuucauccca

SEQ ID NO: 1321 - RNA, 19 nt, JC polyomavirus
cuuaacccaagaagcucuu

SEQ ID NO: 1322 - RNA, 19 nt, JC polyomavirus
aagagcuucuuggguuaag

SEQ ID NO: 1323 - RNA, 19 nt, JC polyomavirus
auugugcaguggaaagaaa

SEQ ID NO: 1324 - RNA, 19 nt, JC polyomavirus
uuucuuuccacugcacaau

SEQ ID NO: 1325 - RNA, 19 nt, JC polyomavirus
cuuuauugcaaggaauggc

SEQ ID NO: 1326 - RNA, 19 nt, JC polyomavirus
gccauuccuugcaauaaag

SEQ ID NO: 1327 - RNA, 19 nt, JC polyomavirus
gagcaugacuuuaacccag

SEQ ID NO: 1328 - RNA, 19 nt, JC polyomavirus
cuggguuaaagucaugcuc

SEQ ID NO: 1329 - RNA, 19 nt, JC polyomavirus
gugauuuuccuccuaauuc

SEQ ID NO: 1330 - RNA, 19 nt, JC polyomavirus
gaauuaggaggaaaaucac

SEQ ID NO: 1331 - RNA, 19 nt, JC polyomavirus
ugauugcuucagacaaugg

SEQ ID NO: 1332 - RNA, 19 nt, JC polyomavirus
ccauugucugaagcaauca

SEQ ID NO: 1333 - RNA, 19 nt, JC polyomavirus
aagcucaaauuuuauauaa

SEQ ID NO: 1334 - RNA, 19 nt, JC polyomavirus
uuauauaaaauuugagcuu

SEQ ID NO: 1335 - RNA, 19 nt, JC polyomavirus
cuggacauggaucaagcac

SEQ ID NO: 1336 - RNA, 19 nt, JC polyomavirus
gugcuugauccauguccag

SEQ ID NO: 1337 - RNA, 19 nt, JC polyomavirus
ucaaauuuuauauaagaaa

SEQ ID NO: 1338 - RNA, 19 nt, JC polyomavirus
uuucuuauauaaaauuuga

SEQ ID NO: 1339 - RNA, 19 nt, JC polyomavirus
ugugcaguggaaagaaagg

SEQ ID NO: 1340 - RNA, 19 nt, JC polyomavirus
ccuuucuuuccacugcaca

SEQ ID NO: 1341 - RNA, 19 nt, JC polyomavirus
uugguacauggaauaguuc

SEQ ID NO: 1342 - RNA, 19 nt, JC polyomavirus
gaacuauuccauguaccaa

SEQ ID NO: 1343 - RNA, 19 nt, JC polyomavirus
aagugggaugaagaccugu

SEQ ID NO: 1344 - RNA, 19 nt, JC polyomavirus
acaggucuucaucccacuu

SEQ ID NO: 1345 - RNA, 19 nt, JC polyomavirus
ggaugaagaccuguuuugc

SEQ ID NO: 1346 - RNA, 19 nt, JC polyomavirus
gcaaaacaggucuucaucc

SEQ ID NO: 1347 - RNA, 19 nt, JC polyomavirus
ucuggacauggaucaagca

SEQ ID NO: 1348 - RNA, 19 nt, JC polyomavirus
ugcuugauccauguccaga

SEQ ID NO: 1349 - RNA, 19 nt, JC polyomavirus
uuugguacauggaauaguu

SEQ ID NO: 1350 - RNA, 19 nt, JC polyomavirus
aacuauuccauguaccaaa

SEQ ID NO: 1351 - RNA, 19 nt, JC polyomavirus
acuuuuaggguuguacggg

SEQ ID NO: 1352 - RNA, 19 nt, JC polyomavirus
cccguacaacccuaaaagu

SEQ ID NO: 1353 - RNA, 19 nt, JC polyomavirus
cuuuuaggguuguacggga

SEQ ID NO: 1354 - RNA, 19 nt, JC polyomavirus
ucccguacaacccuaaaag

SEQ ID NO: 1355 - RNA, 19 nt, JC polyomavirus
cagagcacaaggcguaccu

SEQ ID NO: 1356 - RNA, 19 nt, JC polyomavirus
agguacgccuugugcucug

SEQ ID NO: 1357 - RNA, 19 nt, JC polyomavirus
uaggguuguacgggacugu

SEQ ID NO: 1358 - RNA, 19 nt, JC polyomavirus
acagucccguacaacccua

SEQ ID NO: 1359 - RNA, 19 nt, JC polyomavirus
aggguuguacgggacugua

SEQ ID NO: 1360 - RNA, 19 nt, JC polyomavirus
uacagucccguacaacccu

SEQ ID NO: 1361 - RNA, 19 nt, JC polyomavirus
uuguacgggacuguaacac

SEQ ID NO: 1362 - RNA, 19 nt, JC polyomavirus
guguuacagucccguacaa

SEQ ID NO: 1363 - RNA, 19 nt, JC polyomavirus
gccugauuuugguacaugg

SEQ ID NO: 1364 - RNA, 19 nt, JC polyomavirus
ccauguaccaaaaucaggc

SEQ ID NO: 1365 - RNA, 19 nt, JC polyomavirus
gaaguaguaagggcgugga

SEQ ID NO: 1366 - RNA, 19 nt, JC polyomavirus
uccacgcccuuacuacuuc

SEQ ID NO: 1367 - RNA, 19 nt, JC polyomavirus
auaggccuuacuccugaaa

SEQ ID NO: 1368 - RNA, 19 nt, JC polyomavirus
uuucaggaguaaggccuau

SEQ ID NO: 1369 - RNA, 19 nt, JC polyomavirus
gacagccauaugcaguagu

SEQ ID NO: 1370 - RNA, 19 nt, JC polyomavirus
acuacugcauauggcuguc

SEQ ID NO: 1371 - RNA, 19 nt, JC polyomavirus
aaacuacuugggcaauagu

SEQ ID NO: 1372 - RNA, 19 nt, JC polyomavirus
acuauugcccaaguaguuu

SEQ ID NO: 1373 - RNA, 19 nt, JC polyomavirus
ucagguucaugggugccgc

SEQ ID NO: 1374 - RNA, 19 nt, JC polyomavirus
gcggcacccaugaaccuga

SEQ ID NO: 1375 - RNA, 19 nt, JC polyomavirus
guaguaagggcguggaggc

SEQ ID NO: 1376 - RNA, 19 nt, JC polyomavirus
gccuccacgcccuuacuac

SEQ ID NO: 1377 - RNA, 19 nt, JC polyomavirus
uauugcaaggaauggccua

SEQ ID NO: 1378 - RNA, 19 nt, JC polyomavirus
uaggccauuccuugcaaua

SEQ ID NO: 1379 - RNA, 19 nt, JC polyomavirus
aguaguaagggcguggagg

SEQ ID NO: 1380 - RNA, 19 nt, JC polyomavirus
ccuccacgcccuuacuacu

SEQ ID NO: 1381 - RNA, 19 nt, JC polyomavirus
ugcuauugcuuugauugcu

SEQ ID NO: 1382 - RNA, 19 nt, JC polyomavirus
agcaaucaaagcaauagca

SEQ ID NO: 1383 - RNA, 19 nt, JC polyomavirus
gcuauugcuuugauugcuu

SEQ ID NO: 1384 - RNA, 19 nt, JC polyomavirus
aagcaaucaaagcaauagc

SEQ ID NO: 1385 - RNA, 19 nt, JC polyomavirus
ccuuuacuuuuaggguugu

SEQ ID NO: 1386 - RNA, 19 nt, JC polyomavirus
acaacccuaaaaguaaagg

SEQ ID NO: 1387 - RNA, 19 nt, JC polyomavirus
uuacuuuuaggguuguacg

SEQ ID NO: 1388 - RNA, 19 nt, JC polyomavirus
cguacaacccuaaaaguaa

SEQ ID NO: 1389 - RNA, 19 nt, JC polyomavirus
gcuccucaauggauguugc

SEQ ID NO: 1390 - RNA, 19 nt, JC polyomavirus
gcaacauccauugaggagc

SEQ ID NO: 1391 - RNA, 19 nt, JC polyomavirus
uuauaagaggaggaguaga

SEQ ID NO: 1392 - RNA, 19 nt, JC polyomavirus
ucuacuccuccucuuauaa

SEQ ID NO: 1393 - RNA, 19 nt, JC polyomavirus
aaguaguaagggcguggag

SEQ ID NO: 1394 - RNA, 19 nt, JC polyomavirus
cuccacgcccuuacuacuu

SEQ ID NO: 1395 - RNA, 19 nt, JC polyomavirus
uuaggguuguacgggacug

SEQ ID NO: 1396 - RNA, 19 nt, JC polyomavirus
cagucccguacaacccuaa

SEQ ID NO: 1397 - RNA, 19 nt, JC polyomavirus
gacaugcuuccuuguuaca

SEQ ID NO: 1398 - RNA, 19 nt, JC polyomavirus
uguaacaaggaagcauguc

SEQ ID NO: 1399 - RNA, 19 nt, JC polyomavirus
uguugaauguuggguuccu

SEQ ID NO: 1400 - RNA, 19 nt, JC polyomavirus
aggaacccaacauucaaca

SEQ ID NO: 1401 - RNA, 19 nt, JC polyomavirus
acuuaacccaagaagcucu

SEQ ID NO: 1402 - RNA, 19 nt, JC polyomavirus
agagcuucuuggguuaagu

SEQ ID NO: 1403 - RNA, 19 nt, JC polyomavirus
ucagccugauuuugguaca

SEQ ID NO: 1404 - RNA, 19 nt, JC polyomavirus
uguaccaaaaucaggcuga

SEQ ID NO: 1405 - RNA, 19 nt, JC polyomavirus
uuuuaggguuguacgggac

SEQ ID NO: 1406 - RNA, 19 nt, JC polyomavirus
gucccguacaacccuaaaa

SEQ ID NO: 1407 - RNA, 19 nt, JC polyomavirus
uuuaggguuguacgggacu

SEQ ID NO: 1408 - RNA, 19 nt, JC polyomavirus
agucccguacaacccuaaa

SEQ ID NO: 1409 - RNA, 19 nt, JC polyomavirus
ucccuugcuacuguagagg

SEQ ID NO: 1410 - RNA, 19 nt, JC polyomavirus
ccucuacaguagcaaggga

SEQ ID NO: 1411 - RNA, 19 nt, JC polyomavirus
cccuugcuacuguagaggg

SEQ ID NO: 1412 - RNA, 19 nt, JC polyomavirus
cccucuacaguagcaaggg

SEQ ID NO: 1413 - RNA, 19 nt, JC polyomavirus
ugcuccucaauggauguug

SEQ ID NO: 1414 - RNA, 19 nt, JC polyomavirus
caacauccauugaggagca

SEQ ID NO: 1415 - RNA, 19 nt, JC polyomavirus
gaucugcuccucaauggau

SEQ ID NO: 1416 - RNA, 19 nt, JC polyomavirus
auccauugaggagcagauc

SEQ ID NO: 1417 - RNA, 19 nt, JC polyomavirus
aucugcuccucaauggaug

SEQ ID NO: 1418 - RNA, 19 nt, JC polyomavirus
cauccauugaggagcagau

SEQ ID NO: 1419 - RNA, 19 nt, JC polyomavirus
ucugcuccucaauggaugu

SEQ ID NO: 1420 - RNA, 19 nt, JC polyomavirus
acauccauugaggagcaga

SEQ ID NO: 1421 - RNA, 19 nt, JC polyomavirus
cugcuccucaauggauguu

SEQ ID NO: 1422 - RNA, 19 nt, JC polyomavirus
aacauccauugaggagcag

SEQ ID NO: 1423 - RNA, 19 nt, JC polyomavirus
guuguacgggacuguaaca

SEQ ID NO: 1424 - RNA, 19 nt, JC polyomavirus
uguuacagucccguacaac

SEQ ID NO: 1425 - RNA, 19 nt, JC polyomavirus
uguacgggacuguaacacc

SEQ ID NO: 1426 - RNA, 19 nt, JC polyomavirus
gguguuacagucccguaca

SEQ ID NO: 1427 - RNA, 19 nt, JC polyomavirus
guacgggacuguaacaccu

SEQ ID NO: 1428 - RNA, 19 nt, JC polyomavirus
agguguuacagucccguac

SEQ ID NO: 1429 - RNA, 19 nt, JC polyomavirus
cagccugauuuugguacau

SEQ ID NO: 1430 - RNA, 19 nt, JC polyomavirus
auguaccaaaaucaggcug

SEQ ID NO: 1431 - RNA, 19 nt, JC polyomavirus
gaauagggaggaauccaug

SEQ ID NO: 1432 - RNA, 19 nt, JC polyomavirus
cauggauuccucccuauuc

SEQ ID NO: 1433 - RNA, 19 nt, JC polyomavirus
aagugcugaauagggagga

SEQ ID NO: 1434 - RNA, 19 nt, JC polyomavirus
uccucccuauucagcacuu

SEQ ID NO: 1435 - RNA, 19 nt, JC polyomavirus
aggcugcugcuacuauaga

SEQ ID NO: 1436 - RNA, 19 nt, JC polyomavirus
ucuauaguagcagcagccu

SEQ ID NO: 1437 - RNA, 19 nt, JC polyomavirus
agacagccauaugcaguag

SEQ ID NO: 1438 - RNA, 19 nt, JC polyomavirus
cuacugcauauggcugucu

SEQ ID NO: 1439 - RNA, 19 nt, JC polyomavirus
uucagguucaugggugccg

SEQ ID NO: 1440 - RNA, 19 nt, JC polyomavirus
cggcacccaugaaccugaa

SEQ ID NO: 1441 - RNA, 19 nt, JC polyomavirus
uagacagccauaugcagua

SEQ ID NO: 1442 - RNA, 19 nt, JC polyomavirus
uacugcauauggcugucua

SEQ ID NO: 1443 - RNA, 19 nt, JC polyomavirus
ggagcaugacuuuaaccca

SEQ ID NO: 1444 - RNA, 19 nt, JC polyomavirus
uggguuaaagucaugcucc

SEQ ID NO: 1445 - RNA, 19 nt, JC polyomavirus
guugccuuuacuuuuaggg

SEQ ID NO: 1446 - RNA, 19 nt, JC polyomavirus
cccuaaaaguaaaggcaac

SEQ ID NO: 1447 - RNA, 19 nt, JC polyomavirus
ugugacuuaacccaagaag

SEQ ID NO: 1448 - RNA, 19 nt, JC polyomavirus
cuucuuggguuaagucaca

SEQ ID NO: 1449 - RNA, 19 nt, JC polyomavirus
uauugcuuugauugcuuca

SEQ ID NO: 1450 - RNA, 19 nt, JC polyomavirus
ugaagcaaucaaagcaaua

SEQ ID NO: 1451 - RNA, 19 nt, JC polyomavirus
auauccuguugaauguugg

SEQ ID NO: 1452 - RNA, 19 nt, JC polyomavirus
ccaacauucaacaggauau

SEQ ID NO: 1453 - RNA, 19 nt, JC polyomavirus
uuuauugcaaggaauggcc

SEQ ID NO: 1454 - RNA, 19 nt, JC polyomavirus
ggccauuccuugcaauaaa

SEQ ID NO: 1455 - RNA, 19 nt, JC polyomavirus
uggaagaaacuacuugggc

SEQ ID NO: 1456 - RNA, 19 nt, JC polyomavirus
gcccaaguaguuucuucca

SEQ ID NO: 1457 - RNA, 19 nt, JC polyomavirus
aagacccuaaagacuuucc

SEQ ID NO: 1458 - RNA, 19 nt, JC polyomavirus
ggaaagucuuuagggucuu

SEQ ID NO: 1459 - RNA, 19 nt, JC polyomavirus
uggauguugccuuuacuuu

SEQ ID NO: 1460 - RNA, 19 nt, JC polyomavirus
aaaguaaaggcaacaucca

SEQ ID NO: 1461 - RNA, 19 nt, JC polyomavirus
uuugauugcuucagacaau

SEQ ID NO: 1462 - RNA, 19 nt, JC polyomavirus
auugucugaagcaaucaaa

SEQ ID NO: 1463 - RNA, 19 nt, JC polyomavirus
aauagggaggaauccaugg

SEQ ID NO: 1464 - RNA, 19 nt, JC polyomavirus
ccauggauuccucccuauu

SEQ ID NO: 1465 - RNA, 19 nt, JC polyomavirus
ggacaaagugcugaauagg

SEQ ID NO: 1466 - RNA, 19 nt, JC polyomavirus
ccuauucagcacuuugucc

SEQ ID NO: 1467 - RNA, 19 nt, JC polyomavirus
uggacaaagugcugaauag

SEQ ID NO: 1468 - RNA, 19 nt, JC polyomavirus
cuauucagcacuuugucca

SEQ ID NO: 1469 - RNA, 19 nt, JC polyomavirus
aaauugcaucccuugcuac

SEQ ID NO: 1470 - RNA, 19 nt, JC polyomavirus
guagcaagggaugcaauuu

SEQ ID NO: 1471 - RNA, 19 nt, JC polyomavirus
gcaucccuugcuacuguag

SEQ ID NO: 1472 - RNA, 19 nt, JC polyomavirus
cuacaguagcaagggaugc

SEQ ID NO: 1473 - RNA, 19 nt, JC polyomavirus
aaaaaaagguagaagaccc

SEQ ID NO: 1474 - RNA, 19 nt, JC polyomavirus
gggucuucuaccuuuuuuu

SEQ ID NO: 1475 - RNA, 19 nt, JC polyomavirus
acagagcacaaggcguacc

SEQ ID NO: 1476 - RNA, 19 nt, JC polyomavirus
gguacgccuugugcucugu

SEQ ID NO: 1477 - RNA, 19 nt, JC polyomavirus
ugauuuugguacauggaau

SEQ ID NO: 1478 - RNA, 19 nt, JC polyomavirus
auuccauguaccaaaauca

SEQ ID NO: 1479 - RNA, 19 nt, JC polyomavirus
ggguuguacgggacuguaa

SEQ ID NO: 1480 - RNA, 19 nt, JC polyomavirus
uuacagucccguacaaccc

SEQ ID NO: 1481 - RNA, 19 nt, JC polyomavirus
gguuguacgggacuguaac

SEQ ID NO: 1482 - RNA, 19 nt, JC polyomavirus
guuacagucccguacaacc

SEQ ID NO: 1483 - RNA, 19 nt, JC polyomavirus
acgggacuguaacaccugc

SEQ ID NO: 1484 - RNA, 19 nt, JC polyomavirus
gcagguguuacagucccgu

SEQ ID NO: 1485 - RNA, 19 nt, JC polyomavirus
gggacuguaacaccugcuc

SEQ ID NO: 1486 - RNA, 19 nt, JC polyomavirus
gagcagguguuacaguccc

SEQ ID NO: 1487 - RNA, 19 nt, JC polyomavirus
acuccagaaaugggugacc

SEQ ID NO: 1488 - RNA, 19 nt, JC polyomavirus
ggucacccauuucuggagu

SEQ ID NO: 1489 - RNA, 19 nt, JC polyomavirus
ccugauuuugguacaugga

SEQ ID NO: 1490 - RNA, 19 nt, JC polyomavirus
uccauguaccaaaaucagg

SEQ ID NO: 1491 - DNA, 21 bp, Artificial Sequence
  source: /note="Description of Combined DNA/RNA Molecule: Synthetic oligonucleotide"
  source: /note="Description of Artificial Sequence: Synthetic oligonucleotide"
  modified_base (20)..(21): a, c, g, u, t, unknown or other
cuuauaagaggaggaguagnn

SEQ ID NO: 1492 - DNA, 21 bp, Artificial Sequence
  source: /note="Description of Combined DNA/RNA Molecule: Synthetic oligonucleotide"
  source: /note="Description of Artificial Sequence: Synthetic oligonucleotide"
  modified_base (20)..(21): a, c, g, u, t, unknown or other
cuacuccuccucuuauaagnn

SEQ ID NO: 1493 - DNA, 21 bp, Artificial Sequence
  source: /note="Description of Combined DNA/RNA Molecule: Synthetic oligonucleotide"
  source: /note="Description of Artificial Sequence: Synthetic oligonucleotide"
  modified_base (20)..(21): a, c, g, u, t, unknown or other
caugcuuccuuguuacagunn

SEQ ID NO: 1494 - DNA, 21 bp, Artificial Sequence
  source: /note="Description of Combined DNA/RNA Molecule: Synthetic oligonucleotide"
  source: /note="Description of Artificial Sequence: Synthetic oligonucleotide"
  modified_base (20)..(21): a, c, g, u, t, unknown or other
acuguaacaaggaagcaugnn

SEQ ID NO: 1495 - DNA, 21 bp, Artificial Sequence
  source: /note="Description of Combined DNA/RNA Molecule: Synthetic oligonucleotide"
  source: /note="Description of Artificial Sequence: Synthetic oligonucleotide"
  modified_base (20)..(21): a, c, g, u, t, unknown or other
uacgggacuguaacaccugnn

SEQ ID NO: 1496 - DNA, 21 bp, Artificial Sequence
  source: /note="Description of Combined DNA/RNA Molecule: Synthetic oligonucleotide"
  source: /note="Description of Artificial Sequence: Synthetic oligonucleotide"
  modified_base (20)..(21): a, c, g, u, t, unknown or other
cagguguuacagucccguann

SEQ ID NO: 1497 - DNA, 21 bp, Artificial Sequence
  source: /note="Description of Combined DNA/RNA Molecule: Synthetic oligonucleotide"
  source: /note="Description of Artificial Sequence: Synthetic oligonucleotide"
  modified_base (20)..(21): a, c, g, u, t, unknown or other
ugcuuccuuguuacagugunn

SEQ ID NO: 1498 - DNA, 21 bp, Artificial Sequence
  source: /note="Description of Combined DNA/RNA Molecule: Synthetic oligonucleotide"
  source: /note="Description of Artificial Sequence: Synthetic oligonucleotide"
  modified_base (20)..(21): a, c, g, u, t, unknown or other
acacuguaacaaggaagcann

SEQ ID NO: 1499 - DNA, 21 bp, Artificial Sequence
  source: /note="Description of Combined DNA/RNA Molecule: Synthetic oligonucleotide"
  source: /note="Description of Artificial Sequence: Synthetic oligonucleotide"
  modified_base (20)..(21): a, c, g, u, t, unknown or other
ccuguugaauguuggguucnn

SEQ ID NO: 1500 - DNA, 21 bp, Artificial Sequence
  source: /note="Description of Combined DNA/RNA Molecule: Synthetic oligonucleotide"
  source: /note="Description of Artificial Sequence: Synthetic oligonucleotide"
  modified_base (20)..(21): a, c, g, u, t, unknown or other
gaacccaacauucaacaggnn

SEQ ID NO: 1501 - DNA, 21 bp, Artificial Sequence
  source: /note="Description of Combined DNA/RNA Molecule: Synthetic oligonucleotide"
  source: /note="Description of Artificial Sequence: Synthetic oligonucleotide"
  modified_base (20)..(21): a, c, g, u, t, unknown or other
guugaauguuggguuccugnn

SEQ ID NO: 1502 - DNA, 21 bp, Artificial Sequence
  source: /note="Description of Combined DNA/RNA Molecule: Synthetic oligonucleotide"
  source: /note="Description of Artificial Sequence: Synthetic oligonucleotide"
  modified_base (20)..(21): a, c, g, u, t, unknown or other
caggaacccaacauucaacnn

SEQ ID NO: 1503 - DNA, 21 bp, Artificial Sequence
  source: /note="Description of Combined DNA/RNA Molecule: Synthetic oligonucleotide"
  source: /note="Description of Artificial Sequence: Synthetic oligonucleotide"
  modified_base (20)..(21): a, c, g, u, t, unknown or other
aauguuggguuccugauccnn

SEQ ID NO: 1504 - DNA, 21 bp, Artificial Sequence
  source: /note="Description of Combined DNA/RNA Molecule: Synthetic oligonucleotide"
  source: /note="Description of Artificial Sequence: Synthetic oligonucleotide"
  modified_base (20)..(21): a, c, g, u, t, unknown or other
ggaucaggaacccaacauunn

SEQ ID NO: 1505 - DNA, 21 bp, Artificial Sequence
  source: /note="Description of Combined DNA/RNA Molecule: Synthetic oligonucleotide"
  source: /note="Description of Artificial Sequence: Synthetic oligonucleotide"
  modified_base (20)..(21): a, c, g, u, t, unknown or other
acacuaacaggaggagaaann

SEQ ID NO: 1506 - DNA, 21 bp, Artificial Sequence
  source: /note="Description of Combined DNA/RNA Molecule: Synthetic oligonucleotide"
  source: /note="Description of Artificial Sequence: Synthetic oligonucleotide"
  modified_base (20)..(21): a, c, g, u, t, unknown or other
uuucuccuccuguuagugunn

SEQ ID NO: 1507 - DNA, 21 bp, Artificial Sequence
  source: /note="Description of Combined DNA/RNA Molecule: Synthetic oligonucleotide"
  source: /note="Description of Artificial Sequence: Synthetic oligonucleotide"
  modified_base (20)..(21): a, c, g, u, t, unknown or other
uauaagaggaggaguagaann

SEQ ID NO: 1508 - DNA, 21 bp, Artificial Sequence
  source: /note="Description of Combined DNA/RNA Molecule: Synthetic oligonucleotide"
  source: /note="Description of Artificial Sequence: Synthetic oligonucleotide"
  modified_base (20)..(21): a, c, g, u, t, unknown or other
uucuacuccuccucuuauann

SEQ ID NO: 1509 - DNA, 21 bp, Artificial Sequence
  source: /note="Description of Combined DNA/RNA Molecule: Synthetic oligonucleotide"
  source: /note="Description of Artificial Sequence: Synthetic oligonucleotide"
  modified_base (20)..(21): a, c, g, u, t, unknown or other
auaagaggaggaguagaagnn

SEQ ID NO: 1510 - DNA, 21 bp, Artificial Sequence
  source: /note="Description of Combined DNA/RNA Molecule: Synthetic oligonucleotide"
  source: /note="Description of Artificial Sequence: Synthetic oligonucleotide"
  modified_base (20)..(21): a, c, g, u, t, unknown or other
cuucuacuccuccucuuaunn

SEQ ID NO: 1511 - DNA, 21 bp, Artificial Sequence
  source: /note="Description of Combined DNA/RNA Molecule: Synthetic oligonucleotide"
  source: /note="Description of Artificial Sequence: Synthetic oligonucleotide"
  modified_base (20)..(21): a, c, g, u, t, unknown or other
acuguaacaccugcucuugnn

SEQ ID NO: 1512 - DNA, 21 bp, Artificial Sequence
  source: /note="Description of Combined DNA/RNA Molecule: Synthetic oligonucleotide"
  source: /note="Description of Artificial Sequence: Synthetic oligonucleotide"
  modified_base (20)..(21): a, c, g, u, t, unknown or other
caagagcagguguuacagunn

SEQ ID NO: 1513 - DNA, 21 bp, Artificial Sequence
  source: /note="Description of Combined DNA/RNA Molecule: Synthetic oligonucleotide"
  source: /note="Description of Artificial Sequence: Synthetic oligonucleotide"
  modified_base (20)..(21): a, c, g, u, t, unknown or other
ggacaugcuuccuuguuacnn

SEQ ID NO: 1514 - DNA, 21 bp, Artificial Sequence
  source: /note="Description of Combined DNA/RNA Molecule: Synthetic oligonucleotide"
  source: /note="Description of Artificial Sequence: Synthetic oligonucleotide"
  modified_base (20)..(21): a, c, g, u, t, unknown or other
guaacaaggaagcauguccnn

SEQ ID NO: 1515 - DNA, 21 bp, Artificial Sequence
  source: /note="Description of Combined DNA/RNA Molecule: Synthetic oligonucleotide"
  source: /note="Description of Artificial Sequence: Synthetic oligonucleotide"
  modified_base (20)..(21): a, c, g, u, t, unknown or other
acaugcuuccuuguuacagnn

SEQ ID NO: 1516 - DNA, 21 bp, Artificial Sequence
  source: /note="Description of Combined DNA/RNA Molecule: Synthetic oligonucleotide"
  source: /note="Description of Artificial Sequence: Synthetic oligonucleotide"
  modified_base (20)..(21): a, c, g, u, t, unknown or other
cuguaacaaggaagcaugunn

SEQ ID NO: 1517 - DNA, 21 bp, Artificial Sequence
  source: /note="Description of Combined DNA/RNA Molecule: Synthetic oligonucleotide"
  source: /note="Description of Artificial Sequence: Synthetic oligonucleotide"
  modified_base (20)..(21): a, c, g, u, t, unknown or other
augcuuccuuguuacagugnn

SEQ ID NO: 1518 - DNA, 21 bp, Artificial Sequence
  source: /note="Description of Combined DNA/RNA Molecule: Synthetic oligonucleotide"
  source: /note="Description of Artificial Sequence: Synthetic oligonucleotide"
  modified_base (20)..(21): a, c, g, u, t, unknown or other
cacuguaacaaggaagcaunn

SEQ ID NO: 1519 - DNA, 21 bp, Artificial Sequence
  source: /note="Description of Combined DNA/RNA Molecule: Synthetic oligonucleotide"
  source: /note="Description of Artificial Sequence: Synthetic oligonucleotide"
  modified_base (20)..(21): a, c, g, u, t, unknown or other
cuguugaauguuggguuccnn

SEQ ID NO: 1520 - DNA, 21 bp, Artificial Sequence
  source: /note="Description of Combined DNA/RNA Molecule: Synthetic oligonucleotide"
  source: /note="Description of Artificial Sequence: Synthetic oligonucleotide"
  modified_base (20)..(21): a, c, g, u, t, unknown or other
ggaacccaacauucaacagnn

SEQ ID NO: 1521 - DNA, 21 bp, Artificial Sequence
  source: /note="Description of Combined DNA/RNA Molecule: Synthetic oligonucleotide"
  source: /note="Description of Artificial Sequence: Synthetic oligonucleotide"
  modified_base (20)..(21): a, c, g, u, t, unknown or other
gaauguuggguuccugaucnn

SEQ ID NO: 1522 - DNA, 21 bp, Artificial Sequence
  source: /note="Description of Combined DNA/RNA Molecule: Synthetic oligonucleotide"
  source: /note="Description of Artificial Sequence: Synthetic oligonucleotide"
  modified_base (20)..(21): a, c, g, u, t, unknown or other
gaucaggaacccaacauucnn

SEQ ID NO: 1523 - DNA, 21 bp, Artificial Sequence
  source: /note="Description of Combined DNA/RNA Molecule: Synthetic oligonucleotide"
  source: /note="Description of Artificial Sequence: Synthetic oligonucleotide"
  modified_base (20)..(21): a, c, g, u, t, unknown or other
cgggacuguaacaccugcunn

SEQ ID NO: 1524 - DNA, 21 bp, Artificial Sequence
  source: /note="Description of Combined DNA/RNA Molecule: Synthetic oligonucleotide"
  source: /note="Description of Artificial Sequence: Synthetic oligonucleotide"
  modified_base (20)..(21): a, c, g, u, t, unknown or other
agcagguguuacagucccgnn

SEQ ID NO: 1525 - DNA, 21 bp, Artificial Sequence
  source: /note="Description of Combined DNA/RNA Molecule: Synthetic oligonucleotide"
  source: /note="Description of Artificial Sequence: Synthetic oligonucleotide"
  modified_base (20)..(21): a, c, g, u, t, unknown or other
ggacuguaacaccugcucunn

SEQ ID NO: 1526 - DNA, 21 bp, Artificial Sequence
  source: /note="Description of Combined DNA/RNA Molecule: Synthetic oligonucleotide"
  source: /note="Description of Artificial Sequence: Synthetic oligonucleotide"
  modified_base (20)..(21): a, c, g, u, t, unknown or other
agagcagguguuacaguccnn

SEQ ID NO: 1527 - DNA, 21 bp, Artificial Sequence
  source: /note="Description of Combined DNA/RNA Molecule: Synthetic oligonucleotide"
  source: /note="Description of Artificial Sequence: Synthetic oligonucleotide"
  modified_base (20)..(21): a, c, g, u, t, unknown or other
gacuguaacaccugcucuunn

SEQ ID NO: 1528 - DNA, 21 bp, Artificial Sequence
  source: /note="Description of Combined DNA/RNA Molecule: Synthetic oligonucleotide"
  source: /note="Description of Artificial Sequence: Synthetic oligonucleotide"
  modified_base (20)..(21): a, c, g, u, t, unknown or other
aagagcagguguuacagucnn

SEQ ID NO: 1529 - DNA, 21 bp, Artificial Sequence
  source: /note="Description of Combined DNA/RNA Molecule: Synthetic oligonucleotide"
  source: /note="Description of Artificial Sequence: Synthetic oligonucleotide"
  modified_base (20)..(21): a, c, g, u, t, unknown or other
cuccagaaaugggugacccnn

SEQ ID NO: 1530 - DNA, 21 bp, Artificial Sequence
  source: /note="Description of Combined DNA/RNA Molecule: Synthetic oligonucleotide"
  source: /note="Description of Artificial Sequence: Synthetic oligonucleotide"
  modified_base (20)..(21): a, c, g, u, t, unknown or other
gggucacccauuucuggagnn

SEQ ID NO: 1531 - DNA, 21 bp, Artificial Sequence
  source: /note="Description of Combined DNA/RNA Molecule: Synthetic oligonucleotide"
  source: /note="Description of Artificial Sequence: Synthetic oligonucleotide"
  modified_base (20)..(21): a, c, g, u, t, unknown or other
uaagaggaggaguagaagunn

SEQ ID NO: 1532 - DNA, 21 bp, Artificial Sequence
  source: /note="Description of Combined DNA/RNA Molecule: Synthetic oligonucleotide"
  source: /note="Description of Artificial Sequence: Synthetic oligonucleotide"
  modified_base (20)..(21): a, c, g, u, t, unknown or other
acuucuacuccuccucuuann

SEQ ID NO: 1533 - DNA, 21 bp, Artificial Sequence
  source: /note="Description of Combined DNA/RNA Molecule: Synthetic oligonucleotide"
  source: /note="Description of Artificial Sequence: Synthetic oligonucleotide"
  modified_base (20)..(21): a, c, g, u, t, unknown or other
gaggcugcugcuacuauagnn

SEQ ID NO: 1534 - DNA, 21 bp, Artificial Sequence
  source: /note="Description of Combined DNA/RNA Molecule: Synthetic oligonucleotide"
  source: /note="Description of Artificial Sequence: Synthetic oligonucleotide"
  modified_base (20)..(21): a, c, g, u, t, unknown or other
cuauaguagcagcagccucnn

SEQ ID NO: 1535 - DNA, 21 bp, Artificial Sequence
  source: /note="Description of Combined DNA/RNA Molecule: Synthetic oligonucleotide"
  source: /note="Description of Artificial Sequence: Synthetic oligonucleotide"
  modified_base (20)..(21): a, c, g, u, t, unknown or other
auugcaucccuugcuacugnn

SEQ ID NO: 1536 - DNA, 21 bp, Artificial Sequence
  source: /note="Description of Combined DNA/RNA Molecule: Synthetic oligonucleotide"
  source: /note="Description of Artificial Sequence: Synthetic oligonucleotide"
  modified_base (20)..(21): a, c, g, u, t, unknown or other
caguagcaagggaugcaaunn

SEQ ID NO: 1537 - DNA, 21 bp, Artificial Sequence
  source: /note="Description of Combined DNA/RNA Molecule: Synthetic oligonucleotide"
  source: /note="Description of Artificial Sequence: Synthetic oligonucleotide"
  modified_base (20)..(21): a, c, g, u, t, unknown or other
ugcaucccuugcuacuguann

SEQ ID NO: 1538 - DNA, 21 bp, Artificial Sequence
  source: /note="Description of Combined DNA/RNA Molecule: Synthetic oligonucleotide"
  source: /note="Description of Artificial Sequence: Synthetic oligonucleotide"
  modified_base (20)..(21): a, c, g, u, t, unknown or other
uacaguagcaagggaugcann

SEQ ID NO: 1539 - DNA, 21 bp, Artificial Sequence
  source: /note="Description of Combined DNA/RNA Molecule: Synthetic oligonucleotide"
  source: /note="Description of Artificial Sequence: Synthetic oligonucleotide"
  modified_base (20)..(21): a, c, g, u, t, unknown or other
uuguguuuucagguucaugnn

SEQ ID NO: 1540 - DNA, 21 bp, Artificial Sequence
  source: /note="Description of Combined DNA/RNA Molecule: Synthetic oligonucleotide"
  source: /note="Description of Artificial Sequence: Synthetic oligonucleotide"
  modified_base (20)..(21): a, c, g, u, t, unknown or other
caugaaccugaaaacacaann

SEQ ID NO: 1541 - DNA, 21 bp, Artificial Sequence
  source: /note="Description of Combined DNA/RNA Molecule: Synthetic oligonucleotide"
  source: /note="Description of Artificial Sequence: Synthetic oligonucleotide"
  modified_base (20)..(21): a, c, g, u, t, unknown or other
ggaccuaguugcuacuguunn

SEQ ID NO: 1542 - DNA, 21 bp, Artificial Sequence
  source: /note="Description of Combined DNA/RNA Molecule: Synthetic oligonucleotide"
  source: /note="Description of Artificial Sequence: Synthetic oligonucleotide"
  modified_base (20)..(21): a, c, g, u, t, unknown or other
aacaguagcaacuagguccnn

SEQ ID NO: 1543 - DNA, 21 bp, Artificial Sequence
  source: /note="Description of Combined DNA/RNA Molecule: Synthetic oligonucleotide"
  source: /note="Description of Artificial Sequence: Synthetic oligonucleotide"
  modified_base (20)..(21): a, c, g, u, t, unknown or other
cugccacaggauuuucagunn

SEQ ID NO: 1544 - DNA, 21 bp, Artificial Sequence
  source: /note="Description of Combined DNA/RNA Molecule: Synthetic oligonucleotide"
  source: /note="Description of Artificial Sequence: Synthetic oligonucleotide"
  modified_base (20)..(21): a, c, g, u, t, unknown or other
acugaaaauccuguggcagnn

SEQ ID NO: 1545 - DNA, 21 bp, Artificial Sequence
  source: /note="Description of Combined DNA/RNA Molecule: Synthetic oligonucleotide"
  source: /note="Description of Artificial Sequence: Synthetic oligonucleotide"
  modified_base (20)..(21): a, c, g, u, t, unknown or other
gcuacuauagaaguugaaann

SEQ ID NO: 1546 - DNA, 21 bp, Artificial Sequence
  source: /note="Description of Combined DNA/RNA Molecule: Synthetic oligonucleotide"
  source: /note="Description of Artificial Sequence: Synthetic oligonucleotide"
  modified_base (20)..(21): a, c, g, u, t, unknown or other
uuucaacuucuauaguagcnn

SEQ ID NO: 1547 - DNA, 21 bp, Artificial Sequence
  source: /note="Description of Combined DNA/RNA Molecule: Synthetic oligonucleotide"
  source: /note="Description of Artificial Sequence: Synthetic oligonucleotide"
  modified_base (20)..(21): a, c, g, u, t, unknown or other
aauugcaucccuugcuacunn

SEQ ID NO: 1548 - DNA, 21 bp, Artificial Sequence
  source: /note="Description of Combined DNA/RNA Molecule: Synthetic oligonucleotide"
  source: /note="Description of Artificial Sequence: Synthetic oligonucleotide"
  modified_base (20)..(21): a, c, g, u, t, unknown or other
aguagcaagggaugcaauunn

SEQ ID NO: 1549 - DNA, 21 bp, Artificial Sequence
  source: /note="Description of Combined DNA/RNA Molecule: Synthetic oligonucleotide"
  source: /note="Description of Artificial Sequence: Synthetic oligonucleotide"
  modified_base (20)..(21): a, c, g, u, t, unknown or other
accuaguugcuacuguuucnn

SEQ ID NO: 1550 - DNA, 21 bp, Artificial Sequence
  source: /note="Description of Combined DNA/RNA Molecule: Synthetic oligonucleotide"
  source: /note="Description of Artificial Sequence: Synthetic oligonucleotide"
  modified_base (20)..(21): a, c, g, u, t, unknown or other
gaaacaguagcaacuaggunn

SEQ ID NO: 1551 - DNA, 21 bp, Artificial Sequence
  source: /note="Description of Combined DNA/RNA Molecule: Synthetic oligonucleotide"
  source: /note="Description of Artificial Sequence: Synthetic oligonucleotide"
  modified_base (20)..(21): a, c, g, u, t, unknown or other
cuacuauagaaguugaaaunn

SEQ ID NO: 1552 - DNA, 21 bp, Artificial Sequence
  source: /note="Description of Combined DNA/RNA Molecule: Synthetic oligonucleotide"
  source: /note="Description of Artificial Sequence: Synthetic oligonucleotide"
  modified_base (20)..(21): a, c, g, u, t, unknown or other
auuucaacuucuauaguagnn

SEQ ID NO: 1553 - DNA, 21 bp, Artificial Sequence
  source: /note="Description of Combined DNA/RNA Molecule: Synthetic oligonucleotide"
  source: /note="Description of Artificial Sequence: Synthetic oligonucleotide"
  modified_base (20)..(21): a, c, g, u, t, unknown or other
aggccuuacuccugaaacann

SEQ ID NO: 1554 - DNA, 21 bp, Artificial Sequence
  source: /note="Description of Combined DNA/RNA Molecule: Synthetic oligonucleotide"
  source: /note="Description of Artificial Sequence: Synthetic oligonucleotide"
  modified_base (20)..(21): a, c, g, u, t, unknown or other
uguuucaggaguaaggccunn

SEQ ID NO: 1555 - DNA, 21 bp, Artificial Sequence
  source: /note="Description of Combined DNA/RNA Molecule: Synthetic oligonucleotide"
  source: /note="Description of Artificial Sequence: Synthetic oligonucleotide"
  modified_base (20)..(21): a, c, g, u, t, unknown or other
ggccuuacuccugaaacaunn

SEQ ID NO: 1556 - DNA, 21 bp, Artificial Sequence
  source: /note="Description of Combined DNA/RNA Molecule: Synthetic oligonucleotide"
  source: /note="Description of Artificial Sequence: Synthetic oligonucleotide"
  modified_base (20)..(21): a, c, g, u, t, unknown or other
auguuucaggaguaaggccnn

SEQ ID NO: 1557 - DNA, 21 bp, Artificial Sequence
  source: /note="Description of Combined DNA/RNA Molecule: Synthetic oligonucleotide"
  source: /note="Description of Artificial Sequence: Synthetic oligonucleotide"
  modified_base (20)..(21): a, c, g, u, t, unknown or other
guaaaaccuggaguggaacnn

SEQ ID NO: 1558 - DNA, 21 bp, Artificial Sequence
  source: /note="Description of Combined DNA/RNA Molecule: Synthetic oligonucleotide"
  source: /note="Description of Artificial Sequence: Synthetic oligonucleotide"
  modified_base (20)..(21): a, c, g, u, t, unknown or other
guuccacuccagguuuuacnn

SEQ ID NO: 1559 - DNA, 21 bp, Artificial Sequence
  source: /note="Description of Combined DNA/RNA Molecule: Synthetic oligonucleotide"
  source: /note="Description of Artificial Sequence: Synthetic oligonucleotide"
  modified_base (20)..(21): a, c, g, u, t, unknown or other
uguguuuucagguucauggnn

SEQ ID NO: 1560 - DNA, 21 bp, Artificial Sequence
  source: /note="Description of Combined DNA/RNA Molecule: Synthetic oligonucleotide"
  source: /note="Description of Artificial Sequence: Synthetic oligonucleotide"
  modified_base (20)..(21): a, c, g, u, t, unknown or other
ccaugaaccugaaaacacann

SEQ ID NO: 1561 - DNA, 21 bp, Artificial Sequence
  source: /note="Description of Combined DNA/RNA Molecule: Synthetic oligonucleotide"
  source: /note="Description of Artificial Sequence: Synthetic oligonucleotide"
  modified_base (20)..(21): a, c, g, u, t, unknown or other
uguuuucagguucaugggunn

SEQ ID NO: 1562 - DNA, 21 bp, Artificial Sequence
  source: /note="Description of Combined DNA/RNA Molecule: Synthetic oligonucleotide"
  source: /note="Description of Artificial Sequence: Synthetic oligonucleotide"
  modified_base (20)..(21): a, c, g, u, t, unknown or other
acccaugaaccugaaaacann

SEQ ID NO: 1563 - DNA, 21 bp, Artificial Sequence
  source: /note="Description of Combined DNA/RNA Molecule: Synthetic oligonucleotide"
  source: /note="Description of Artificial Sequence: Synthetic oligonucleotide"
  modified_base (20)..(21): a, c, g, u, t, unknown or other
aucccuugcuacuguagagnn

SEQ ID NO: 1564 - DNA, 21 bp, Artificial Sequence
  source: /note="Description of Combined DNA/RNA Molecule: Synthetic oligonucleotide"
  source: /note="Description of Artificial Sequence: Synthetic oligonucleotide"
  modified_base (20)..(21): a, c, g, u, t, unknown or other
cucuacaguagcaagggaunn

SEQ ID NO: 1565 - DNA, 21 bp, Artificial Sequence
  source: /note="Description of Combined DNA/RNA Molecule: Synthetic oligonucleotide"
  source: /note="Description of Artificial Sequence: Synthetic oligonucleotide"
  modified_base (20)..(21): a, c, g, u, t, unknown or other
gaccuaguugcuacuguuunn

SEQ ID NO: 1566 - DNA, 21 bp, Artificial Sequence
  source: /note="Description of Combined DNA/RNA Molecule: Synthetic oligonucleotide"
  source: /note="Description of Artificial Sequence: Synthetic oligonucleotide"
  modified_base (20)..(21): a, c, g, u, t, unknown or other
aaacaguagcaacuaggucnn

SEQ ID NO: 1567 - DNA, 21 bp, Artificial Sequence
  source: /note="Description of Combined DNA/RNA Molecule: Synthetic oligonucleotide"
  source: /note="Description of Artificial Sequence: Synthetic oligonucleotide"
  modified_base (20)..(21): a, c, g, u, t, unknown or other
ggauuacaaguaccucugann

SEQ ID NO: 1568 - DNA, 21 bp, Artificial Sequence
  source: /note="Description of Combined DNA/RNA Molecule: Synthetic oligonucleotide"
  source: /note="Description of Artificial Sequence: Synthetic oligonucleotide"
  modified_base (20)..(21): a, c, g, u, t, unknown or other
ucagagguacuuguaauccnn

SEQ ID NO: 1569 - DNA, 21 bp, Artificial Sequence
  source: /note="Description of Combined DNA/RNA Molecule: Synthetic oligonucleotide"
  source: /note="Description of Artificial Sequence: Synthetic oligonucleotide"
  modified_base (20)..(21): a, c, g, u, t, unknown or other
uaggccuuacuccugaaacnn

SEQ ID NO: 1570 - DNA, 21 bp, Artificial Sequence
  source: /note="Description of Combined DNA/RNA Molecule: Synthetic oligonucleotide"
  source: /note="Description of Artificial Sequence: Synthetic oligonucleotide"
  modified_base (20)..(21): a, c, g, u, t, unknown or other
guuucaggaguaaggccuann

SEQ ID NO: 1571 - DNA, 21 bp, Artificial Sequence
  source: /note="Description of Combined DNA/RNA Molecule: Synthetic oligonucleotide"
  source: /note="Description of Artificial Sequence: Synthetic oligonucleotide"
  modified_base (20)..(21): a, c, g, u, t, unknown or other
uguuagaauuuuugcuggann

SEQ ID NO: 1572 - DNA, 21 bp, Artificial Sequence
  source: /note="Description of Combined DNA/RNA Molecule: Synthetic oligonucleotide"
  source: /note="Description of Artificial Sequence: Synthetic oligonucleotide"
  modified_base (20)..(21): a, c, g, u, t, unknown or other
uccagcaaaaauucuaacann

SEQ ID NO: 1573 - DNA, 21 bp, Artificial Sequence
  source: /note="Description of Combined DNA/RNA Molecule: Synthetic oligonucleotide"
  source: /note="Description of Artificial Sequence: Synthetic oligonucleotide"
  modified_base (20)..(21): a, c, g, u, t, unknown or other
ugcugccacaggauuuucann

SEQ ID NO: 1574 - DNA, 21 bp, Artificial Sequence
  source: /note="Description of Combined DNA/RNA Molecule: Synthetic oligonucleotide"
  source: /note="Description of Artificial Sequence: Synthetic oligonucleotide"
  modified_base (20)..(21): a, c, g, u, t, unknown or other
ugaaaauccuguggcagcann

SEQ ID NO: 1575 - DNA, 21 bp, Artificial Sequence
  source: /note="Description of Combined DNA/RNA Molecule: Synthetic oligonucleotide"
  source: /note="Description of Artificial Sequence: Synthetic oligonucleotide"
  modified_base (20)..(21): a, c, g, u, t, unknown or other
ccacaggauuuucaguagcnn

SEQ ID NO: 1576 - DNA, 21 bp, Artificial Sequence
  source: /note="Description of Combined DNA/RNA Molecule: Synthetic oligonucleotide"
  source: /note="Description of Artificial Sequence: Synthetic oligonucleotide"
  modified_base (20)..(21): a, c, g, u, t, unknown or other
gcuacugaaaauccuguggnn

SEQ ID NO: 1577 - DNA, 21 bp, Artificial Sequence
  source: /note="Description of Combined DNA/RNA Molecule: Synthetic oligonucleotide"
  source: /note="Description of Artificial Sequence: Synthetic oligonucleotide"
  modified_base (20)..(21): a, c, g, u, t, unknown or other
aaguugaaauugcaucccunn

SEQ ID NO: 1578 - DNA, 21 bp, Artificial Sequence
  source: /note="Description of Combined DNA/RNA Molecule: Synthetic oligonucleotide"
  source: /note="Description of Artificial Sequence: Synthetic oligonucleotide"
  modified_base (20)..(21): a, c, g, u, t, unknown or other
agggaugcaauuucaacuunn

SEQ ID NO: 1579 - DNA, 21 bp, Artificial Sequence
  source: /note="Description of Combined DNA/RNA Molecule: Synthetic oligonucleotide"
  source: /note="Description of Artificial Sequence: Synthetic oligonucleotide"
  modified_base (20)..(21): a, c, g, u, t, unknown or other
aguugaaauugcaucccuunn

SEQ ID NO: 1580 - DNA, 21 bp, Artificial Sequence
  source: /note="Description of Combined DNA/RNA Molecule: Synthetic oligonucleotide"
  source: /note="Description of Artificial Sequence: Synthetic oligonucleotide"
  modified_base (20)..(21): a, c, g, u, t, unknown or other
aagggaugcaauuucaacunn

SEQ ID NO: 1581 - DNA, 21 bp, Artificial Sequence
  source: /note="Description of Combined DNA/RNA Molecule: Synthetic oligonucleotide"
  source: /note="Description of Artificial Sequence: Synthetic oligonucleotide"
  modified_base (20)..(21): a, c, g, u, t, unknown or other
gcugcugccacaggauuuunn

SEQ ID NO: 1582 - DNA, 21 bp, Artificial Sequence
  source: /note="Description of Combined DNA/RNA Molecule: Synthetic oligonucleotide"
  source: /note="Description of Artificial Sequence: Synthetic oligonucleotide"
  modified_base (20)..(21): a, c, g, u, t, unknown or other
aaaauccuguggcagcagcnn

SEQ ID NO: 1583 - DNA, 21 bp, Artificial Sequence
  source: /note="Description of Combined DNA/RNA Molecule: Synthetic oligonucleotide"
  source: /note="Description of Artificial Sequence: Synthetic oligonucleotide"
  modified_base (20)..(21): a, c, g, u, t, unknown or other
aguaaaaccuggaguggaann

SEQ ID NO: 1584 - DNA, 21 bp, Artificial Sequence
  source: /note="Description of Combined DNA/RNA Molecule: Synthetic oligonucleotide"
  source: /note="Description of Artificial Sequence: Synthetic oligonucleotide"
  modified_base (20)..(21): a, c, g, u, t, unknown or other
uuccacuccagguuuuacunn

SEQ ID NO: 1585 - DNA, 21 bp, Artificial Sequence
  source: /note="Description of Combined DNA/RNA Molecule: Synthetic oligonucleotide"
  source: /note="Description of Artificial Sequence: Synthetic oligonucleotide"
  modified_base (20)..(21): a, c, g, u, t, unknown or other
uuuuguguuuucagguucann

SEQ ID NO: 1586 - DNA, 21 bp, Artificial Sequence
  source: /note="Description of Combined DNA/RNA Molecule: Synthetic oligonucleotide"
  source: /note="Description of Artificial Sequence: Synthetic oligonucleotide"
  modified_base (20)..(21): a, c, g, u, t, unknown or other
ugaaccugaaaacacaaaann

SEQ ID NO: 1587 - DNA, 21 bp, Artificial Sequence
  source: /note="Description of Combined DNA/RNA Molecule: Synthetic oligonucleotide"
  source: /note="Description of Artificial Sequence: Synthetic oligonucleotide"
  modified_base (20)..(21): a, c, g, u, t, unknown or other
uuuguguuuucagguucaunn

SEQ ID NO: 1588 - DNA, 21 bp, Artificial Sequence
  source: /note="Description of Combined DNA/RNA Molecule: Synthetic oligonucleotide"
  source: /note="Description of Artificial Sequence: Synthetic oligonucleotide"
  modified_base (20)..(21): a, c, g, u, t, unknown or other
augaaccugaaaacacaaann

SEQ ID NO: 1589 - DNA, 21 bp, Artificial Sequence
  source: /note="Description of Combined DNA/RNA Molecule: Synthetic oligonucleotide"
  source: /note="Description of Artificial Sequence: Synthetic oligonucleotide"
  modified_base (20)..(21): a, c, g, u, t, unknown or other
guguuuucagguucaugggnn

SEQ ID NO: 1590 - DNA, 21 bp, Artificial Sequence
  source: /note="Description of Combined DNA/RNA Molecule: Synthetic oligonucleotide"
  source: /note="Description of Artificial Sequence: Synthetic oligonucleotide"
  modified_base (20)..(21): a, c, g, u, t, unknown or other
cccaugaaccugaaaacacnn

SEQ ID NO: 1591 - DNA, 21 bp, Artificial Sequence
  source: /note="Description of Combined DNA/RNA Molecule: Synthetic oligonucleotide"
  source: /note="Description of Artificial Sequence: Synthetic oligonucleotide"
  modified_base (20)..(21): a, c, g, u, t, unknown or other
guuuucagguucaugggugnn

SEQ ID NO: 1592 - DNA, 21 bp, Artificial Sequence
  source: /note="Description of Combined DNA/RNA Molecule: Synthetic oligonucleotide"
  source: /note="Description of Artificial Sequence: Synthetic oligonucleotide"
  modified_base (20)..(21): a, c, g, u, t, unknown or other
cacccaugaaccugaaaacnn

SEQ ID NO: 1593 - DNA, 21 bp, Artificial Sequence
  source: /note="Description of Combined DNA/RNA Molecule: Synthetic oligonucleotide"
  source: /note="Description of Artificial Sequence: Synthetic oligonucleotide"
  modified_base (20)..(21): a, c, g, u, t, unknown or other
uuuucagguucaugggugcnn

SEQ ID NO: 1594 - DNA, 21 bp, Artificial Sequence
  source: /note="Description of Combined DNA/RNA Molecule: Synthetic oligonucleotide"
  source: /note="Description of Artificial Sequence: Synthetic oligonucleotide"
  modified_base (20)..(21): a, c, g, u, t, unknown or other
gcacccaugaaccugaaaann

SEQ ID NO: 1595 - DNA, 21 bp, Artificial Sequence
  source: /note="Description of Combined DNA/RNA Molecule: Synthetic oligonucleotide"
  source: /note="Description of Artificial Sequence: Synthetic oligonucleotide"
  modified_base (20)..(21): a, c, g, u, t, unknown or other
uuucagguucaugggugccnn

SEQ ID NO: 1596 - DNA, 21 bp, Artificial Sequence
  source: /note="Description of Combined DNA/RNA Molecule: Synthetic oligonucleotide"
  source: /note="Description of Artificial Sequence: Synthetic oligonucleotide"
  modified_base (20)..(21): a, c, g, u, t, unknown or other
ggcacccaugaaccugaaann

SEQ ID NO: 1597 - DNA, 21 bp, Artificial Sequence
  source: /note="Description of Combined DNA/RNA Molecule: Synthetic oligonucleotide"
  source: /note="Description of Artificial Sequence: Synthetic oligonucleotide"
  modified_base (20)..(21): a, c, g, u, t, unknown or other
aauugcugcuggagaggcunn

SEQ ID NO: 1598 - DNA, 21 bp, Artificial Sequence
  source: /note="Description of Combined DNA/RNA Molecule: Synthetic oligonucleotide"
  source: /note="Description of Artificial Sequence: Synthetic oligonucleotide"
  modified_base (20)..(21): a, c, g, u, t, unknown or other
agccucuccagcagcaauunn

SEQ ID NO: 1599 - DNA, 21 bp, Artificial Sequence
  source: /note="Description of Combined DNA/RNA Molecule: Synthetic oligonucleotide"
  source: /note="Description of Artificial Sequence: Synthetic oligonucleotide"
  modified_base (20)..(21): a, c, g, u, t, unknown or other
uugcaucccuugcuacugunn

SEQ ID NO: 1600 - DNA, 21 bp, Artificial Sequence
  source: /note="Description of Combined DNA/RNA Molecule: Synthetic oligonucleotide"
  source: /note="Description of Artificial Sequence: Synthetic oligonucleotide"
  modified_base (20)..(21): a, c, g, u, t, unknown or other
acaguagcaagggaugcaann

SEQ ID NO: 1601 - DNA, 21 bp, Artificial Sequence
  source: /note="Description of Combined DNA/RNA Molecule: Synthetic oligonucleotide"
  source: /note="Description of Artificial Sequence: Synthetic oligonucleotide"
  modified_base (20)..(21): a, c, g, u, t, unknown or other
gcuguagcuggguuugcugnn

SEQ ID NO: 1602 - DNA, 21 bp, Artificial Sequence
  source: /note="Description of Combined DNA/RNA Molecule: Synthetic oligonucleotide"
  source: /note="Description of Artificial Sequence: Synthetic oligonucleotide"
  modified_base (20)..(21): a, c, g, u, t, unknown or other
cagcaaacccagcuacagcnn

SEQ ID NO: 1603 - DNA, 21 bp, Artificial Sequence
  source: /note="Description of Combined DNA/RNA Molecule: Synthetic oligonucleotide"
  source: /note="Description of Artificial Sequence: Synthetic oligonucleotide"
  modified_base (20)..(21): a, c, g, u, t, unknown or other
uagaaguugaaauugcaucnn

SEQ ID NO: 1604 - DNA, 21 bp, Artificial Sequence
  source: /note="Description of Combined DNA/RNA Molecule: Synthetic oligonucleotide"
  source: /note="Description of Artificial Sequence: Synthetic oligonucleotide"
  modified_base (20)..(21): a, c, g, u, t, unknown or other
gaugcaauuucaacuucuann

SEQ ID NO: 1605 - DNA, 21 bp, Artificial Sequence
  source: /note="Description of Combined DNA/RNA Molecule: Synthetic oligonucleotide"
  source: /note="Description of Artificial Sequence: Synthetic oligonucleotide"
  modified_base (20)..(21): a, c, g, u, t, unknown or other
gaaguugaaauugcaucccnn

SEQ ID NO: 1606 - DNA, 21 bp, Artificial Sequence
  source: /note="Description of Combined DNA/RNA Molecule: Synthetic oligonucleotide"
  source: /note="Description of Artificial Sequence: Synthetic oligonucleotide"
  modified_base (20)..(21): a, c, g, u, t, unknown or other
gggaugcaauuucaacuucnn

SEQ ID NO: 1607 - DNA, 21 bp, Artificial Sequence
  source: /note="Description of Combined DNA/RNA Molecule: Synthetic oligonucleotide"
  source: /note="Description of Artificial Sequence: Synthetic oligonucleotide"
  modified_base (20)..(21): a, c, g, u, t, unknown or other
caucccuugcuacuguagann

SEQ ID NO: 1608 - DNA, 21 bp, Artificial Sequence
  source: /note="Description of Combined DNA/RNA Molecule: Synthetic oligonucleotide"
  source: /note="Description of Artificial Sequence: Synthetic oligonucleotide"
  modified_base (20)..(21): a, c, g, u, t, unknown or other
ucuacaguagcaagggaugnn

SEQ ID NO: 1609 - DNA, 21 bp, Artificial Sequence
  source: /note="Description of Combined DNA/RNA Molecule: Synthetic oligonucleotide"
  source: /note="Description of Artificial Sequence: Synthetic oligonucleotide"
  modified_base (20)..(21): a, c, g, u, t, unknown or other
uaguaaaaccuggaguggann

SEQ ID NO: 1610 - DNA, 21 bp, Artificial Sequence
  source: /note="Description of Combined DNA/RNA Molecule: Synthetic oligonucleotide"
  source: /note="Description of Artificial Sequence: Synthetic oligonucleotide"
  modified_base (20)..(21): a, c, g, u, t, unknown or other
uccacuccagguuuuacuann

SEQ ID NO: 1611 - DNA, 21 bp, Artificial Sequence
  source: /note="Description of Combined DNA/RNA Molecule: Synthetic oligonucleotide"
  source: /note="Description of Artificial Sequence: Synthetic oligonucleotide"
  modified_base (20)..(21): a, c, g, u, t, unknown or other
uuuuuuguuagaauuuuugnn

SEQ ID NO: 1612 - DNA, 21 bp, Artificial Sequence
  source: /note="Description of Combined DNA/RNA Molecule: Synthetic oligonucleotide"
  source: /note="Description of Artificial Sequence: Synthetic oligonucleotide"
  modified_base (20)..(21): a, c, g, u, t, unknown or other
caaaaauucuaacaaaaaann

SEQ ID NO: 1613 - DNA, 21 bp, Artificial Sequence
  source: /note="Description of Combined DNA/RNA Molecule: Synthetic oligonucleotide"
  source: /note="Description of Artificial Sequence: Synthetic oligonucleotide"
  modified_base (20)..(21): a, c, g, u, t, unknown or other
uacuauagaaguugaaauunn

SEQ ID NO: 1614 - DNA, 21 bp, Artificial Sequence
  source: /note="Description of Combined DNA/RNA Molecule: Synthetic oligonucleotide"
  source: /note="Description of Artificial Sequence: Synthetic oligonucleotide"
  modified_base (20)..(21): a, c, g, u, t, unknown or other
aauuucaacuucuauaguann

SEQ ID NO: 1615 - DNA, 21 bp, Artificial Sequence
  source: /note="Description of Combined DNA/RNA Molecule: Synthetic oligonucleotide"
  source: /note="Description of Artificial Sequence: Synthetic oligonucleotide"
  modified_base (20)..(21): a, c, g, u, t, unknown or other
ccuaguugcuacuguuucunn

SEQ ID NO: 1616 - DNA, 21 bp, Artificial Sequence
  source: /note="Description of Combined DNA/RNA Molecule: Synthetic oligonucleotide"
  source: /note="Description of Artificial Sequence: Synthetic oligonucleotide"
  modified_base (20)..(21): a, c, g, u, t, unknown or other
agaaacaguagcaacuaggnn

SEQ ID NO: 1617 - DNA, 21 bp, Artificial Sequence
  source: /note="Description of Combined DNA/RNA Molecule: Synthetic oligonucleotide"
  source: /note="Description of Artificial Sequence: Synthetic oligonucleotide"
  modified_base (20)..(21): a, c, g, u, t, unknown or other
cuaguugcuacuguuucugnn

SEQ ID NO: 1618 - DNA, 21 bp, Artificial Sequence
  source: /note="Description of Combined DNA/RNA Molecule: Synthetic oligonucleotide"
  source: /note="Description of Artificial Sequence: Synthetic oligonucleotide"
  modified_base (20)..(21): a, c, g, u, t, unknown or other
cagaaacaguagcaacuagnn

SEQ ID NO: 1619 - DNA, 21 bp, Artificial Sequence
  source: /note="Description of Combined DNA/RNA Molecule: Synthetic oligonucleotide"
  source: /note="Description of Artificial Sequence: Synthetic oligonucleotide"
  modified_base (20)..(21): a, c, g, u, t, unknown or other
guugcuacuguuucugaggnn

SEQ ID NO: 1620 - DNA, 21 bp, Artificial Sequence
  source: /note="Description of Combined DNA/RNA Molecule: Synthetic oligonucleotide"
  source: /note="Description of Artificial Sequence: Synthetic oligonucleotide"
  modified_base (20)..(21): a, c, g, u, t, unknown or other
ccucagaaacaguagcaacnn

SEQ ID NO: 1621 - DNA, 21 bp, Artificial Sequence
  source: /note="Description of Combined DNA/RNA Molecule: Synthetic oligonucleotide"
  source: /note="Description of Artificial Sequence: Synthetic oligonucleotide"
  modified_base (20)..(21): a, c, g, u, t, unknown or other
uggagaggcugcugcuacunn

SEQ ID NO: 1622 - DNA, 21 bp, Artificial Sequence
  source: /note="Description of Combined DNA/RNA Molecule: Synthetic oligonucleotide"
  source: /note="Description of Artificial Sequence: Synthetic oligonucleotide"
  modified_base (20)..(21): a, c, g, u, t, unknown or other
aguagcagcagccucuccann

SEQ ID NO: 1623 - DNA, 21 bp, Artificial Sequence
  source: /note="Description of Combined DNA/RNA Molecule: Synthetic oligonucleotide"
  source: /note="Description of Artificial Sequence: Synthetic oligonucleotide"
  modified_base (20)..(21): a, c, g, u, t, unknown or other
gagaggcugcugcuacuaunn

SEQ ID NO: 1624 - DNA, 21 bp, Artificial Sequence
  source: /note="Description of Combined DNA/RNA Molecule: Synthetic oligonucleotide"
  source: /note="Description of Artificial Sequence: Synthetic oligonucleotide"
  modified_base (20)..(21): a, c, g, u, t, unknown or other
auaguagcagcagccucucnn

SEQ ID NO: 1625 - DNA, 21 bp, Artificial Sequence
  source: /note="Description of Combined DNA/RNA Molecule: Synthetic oligonucleotide"
  source: /note="Description of Artificial Sequence: Synthetic oligonucleotide"
  modified_base (20)..(21): a, c, g, u, t, unknown or other
agaggcugcugcuacuauann

SEQ ID NO: 1626 - DNA, 21 bp, Artificial Sequence
  source: /note="Description of Combined DNA/RNA Molecule: Synthetic oligonucleotide"
  source: /note="Description of Artificial Sequence: Synthetic oligonucleotide"
  modified_base (20)..(21): a, c, g, u, t, unknown or other
uauaguagcagcagccucunn

SEQ ID NO: 1627 - DNA, 21 bp, Artificial Sequence
  source: /note="Description of Combined DNA/RNA Molecule: Synthetic oligonucleotide"
  source: /note="Description of Artificial Sequence: Synthetic oligonucleotide"
  modified_base (20)..(21): a, c, g, u, t, unknown or other
gcugcugcuacuauagaagnn

SEQ ID NO: 1628 - DNA, 21 bp, Artificial Sequence
  source: /note="Description of Combined DNA/RNA Molecule: Synthetic oligonucleotide"
  source: /note="Description of Artificial Sequence: Synthetic oligonucleotide"
  modified_base (20)..(21): a, c, g, u, t, unknown or other
cuucuauaguagcagcagcnn

SEQ ID NO: 1629 - DNA, 21 bp, Artificial Sequence
  source: /note="Description of Combined DNA/RNA Molecule: Synthetic oligonucleotide"
  source: /note="Description of Artificial Sequence: Synthetic oligonucleotide"
  modified_base (20)..(21): a, c, g, u, t, unknown or other
uuuuuuguguuuucagguunn

SEQ ID NO: 1630 - DNA, 21 bp, Artificial Sequence
  source: /note="Description of Combined DNA/RNA Molecule: Synthetic oligonucleotide"
  source: /note="Description of Artificial Sequence: Synthetic oligonucleotide"
  modified_base (20)..(21): a, c, g, u, t, unknown or other
aaccugaaaacacaaaaaann

SEQ ID NO: 1631 - DNA, 21 bp, Artificial Sequence
  source: /note="Description of Combined DNA/RNA Molecule: Synthetic oligonucleotide"
  source: /note="Description of Artificial Sequence: Synthetic oligonucleotide"
  modified_base (20)..(21): a, c, g, u, t, unknown or other
acuauagaaguugaaauugnn

SEQ ID NO: 1632 - DNA, 21 bp, Artificial Sequence
  source: /note="Description of Combined DNA/RNA Molecule: Synthetic oligonucleotide"
  source: /note="Description of Artificial Sequence: Synthetic oligonucleotide"
  modified_base (20)..(21): a, c, g, u, t, unknown or other
caauuucaacuucuauagunn

SEQ ID NO: 1633 - DNA, 21 bp, Artificial Sequence
  source: /note="Description of Combined DNA/RNA Molecule: Synthetic oligonucleotide"
  source: /note="Description of Artificial Sequence: Synthetic oligonucleotide"
  modified_base (20)..(21): a, c, g, u, t, unknown or other
uuaguaaaaccuggaguggnn

SEQ ID NO: 1634 - DNA, 21 bp, Artificial Sequence
  source: /note="Description of Combined DNA/RNA Molecule: Synthetic oligonucleotide"
  source: /note="Description of Artificial Sequence: Synthetic oligonucleotide"
  modified_base (20)..(21): a, c, g, u, t, unknown or other
ccacuccagguuuuacuaann

SEQ ID NO: 1635 - DNA, 21 bp, Artificial Sequence
  source: /note="Description of Combined DNA/RNA Molecule: Synthetic oligonucleotide"
  source: /note="Description of Artificial Sequence: Synthetic oligonucleotide"
  modified_base (20)..(21): a, c, g, u, t, unknown or other
gccuuacuccugaaacauann

SEQ ID NO: 1636 - DNA, 21 bp, Artificial Sequence
  source: /note="Description of Combined DNA/RNA Molecule: Synthetic oligonucleotide"
  source: /note="Description of Artificial Sequence: Synthetic oligonucleotide"
  modified_base (20)..(21): a, c, g, u, t, unknown or other
uauguuucaggaguaaggcnn

SEQ ID NO: 1637 - DNA, 21 bp, Artificial Sequence
  source: /note="Description of Combined DNA/RNA Molecule: Synthetic oligonucleotide"
  source: /note="Description of Artificial Sequence: Synthetic oligonucleotide"
  modified_base (20)..(21): a, c, g, u, t, unknown or other
agaaguugaaauugcauccnn

SEQ ID NO: 1638 - DNA, 21 bp, Artificial Sequence
  source: /note="Description of Combined DNA/RNA Molecule: Synthetic oligonucleotide"
  source: /note="Description of Artificial Sequence: Synthetic oligonucleotide"
  modified_base (20)..(21): a, c, g, u, t, unknown or other
ggaugcaauuucaacuucunn

SEQ ID NO: 1639 - DNA, 21 bp, Artificial Sequence
  source: /note="Description of Combined DNA/RNA Molecule: Synthetic oligonucleotide"
  source: /note="Description of Artificial Sequence: Synthetic oligonucleotide"
  modified_base (20)..(21): a, c, g, u, t, unknown or other
ugccacaggauuuucaguann

SEQ ID NO: 1640 - DNA, 21 bp, Artificial Sequence
  source: /note="Description of Combined DNA/RNA Molecule: Synthetic oligonucleotide"
  source: /note="Description of Artificial Sequence: Synthetic oligonucleotide"
  modified_base (20)..(21): a, c, g, u, t, unknown or other
uacugaaaauccuguggcann

SEQ ID NO: 1641 - DNA, 21 bp, Artificial Sequence
  source: /note="Description of Combined DNA/RNA Molecule: Synthetic oligonucleotide"
  source: /note="Description of Artificial Sequence: Synthetic oligonucleotide"
  modified_base (20)..(21): a, c, g, u, t, unknown or other
gcugccacaggauuuucagnn

SEQ ID NO: 1642 - DNA, 21 bp, Artificial Sequence
  source: /note="Description of Combined DNA/RNA Molecule: Synthetic oligonucleotide"
  source: /note="Description of Artificial Sequence: Synthetic oligonucleotide"
  modified_base (20)..(21): a, c, g, u, t, unknown or other
cugaaaauccuguggcagcnn

SEQ ID NO: 1643 - DNA, 21 bp, Artificial Sequence
  source: /note="Description of Combined DNA/RNA Molecule: Synthetic oligonucleotide"
  source: /note="Description of Artificial Sequence: Synthetic oligonucleotide"
  modified_base (20)..(21): a, c, g, u, t, unknown or other
cagguucaugggugccgcann

SEQ ID NO: 1644 - DNA, 21 bp, Artificial Sequence
  source: /note="Description of Combined DNA/RNA Molecule: Synthetic oligonucleotide"
  source: /note="Description of Artificial Sequence: Synthetic oligonucleotide"
  modified_base (20)..(21): a, c, g, u, t, unknown or other
ugcggcacccaugaaccugnn

SEQ ID NO: 1645 - DNA, 21 bp, Artificial Sequence
  source: /note="Description of Combined DNA/RNA Molecule: Synthetic oligonucleotide"
  source: /note="Description of Artificial Sequence: Synthetic oligonucleotide"
  modified_base (20)..(21): a, c, g, u, t, unknown or other
aaauugcugcuggagaggcnn

SEQ ID NO: 1646 - DNA, 21 bp, Artificial Sequence
  source: /note="Description of Combined DNA/RNA Molecule: Synthetic oligonucleotide"
  source: /note="Description of Artificial Sequence: Synthetic oligonucleotide"
  modified_base (20)..(21): a, c, g, u, t, unknown or other
gccucuccagcagcaauuunn

SEQ ID NO: 1647 - DNA, 21 bp, Artificial Sequence
  source: /note="Description of Combined DNA/RNA Molecule: Synthetic oligonucleotide"
  source: /note="Description of Artificial Sequence: Synthetic oligonucleotide"
  modified_base (20)..(21): a, c, g, u, t, unknown or other
auugcugcuggagaggcugnn

SEQ ID NO: 1648 - DNA, 21 bp, Artificial Sequence
  source: /note="Description of Combined DNA/RNA Molecule: Synthetic oligonucleotide"
  source: /note="Description of Artificial Sequence: Synthetic oligonucleotide"
  modified_base (20)..(21): a, c, g, u, t, unknown or other
cagccucuccagcagcaaunn

SEQ ID NO: 1649 - DNA, 21 bp, Artificial Sequence
  source: /note="Description of Combined DNA/RNA Molecule: Synthetic oligonucleotide"
  source: /note="Description of Artificial Sequence: Synthetic oligonucleotide"
  modified_base (20)..(21): a, c, g, u, t, unknown or other
ugaaauugcaucccuugcunn

SEQ ID NO: 1650 - DNA, 21 bp, Artificial Sequence
  source: /note="Description of Combined DNA/RNA Molecule: Synthetic oligonucleotide"
  source: /note="Description of Artificial Sequence: Synthetic oligonucleotide"
  modified_base (20)..(21): a, c, g, u, t, unknown or other
agcaagggaugcaauuucann

SEQ ID NO: 1651 - DNA, 21 bp, Artificial Sequence
  source: /note="Description of Combined DNA/RNA Molecule: Synthetic oligonucleotide"
  source: /note="Description of Artificial Sequence: Synthetic oligonucleotide"
  modified_base (20)..(21): a, c, g, u, t, unknown or other
uuuuguuagaauuuuugcunn

SEQ ID NO: 1652 - DNA, 21 bp, Artificial Sequence
  source: /note="Description of Combined DNA/RNA Molecule: Synthetic oligonucleotide"
  source: /note="Description of Artificial Sequence: Synthetic oligonucleotide"
  modified_base (20)..(21): a, c, g, u, t, unknown or other
agcaaaaauucuaacaaaann

SEQ ID NO: 1653 - DNA, 21 bp, Artificial Sequence
  source: /note="Description of Combined DNA/RNA Molecule: Synthetic oligonucleotide"
  source: /note="Description of Artificial Sequence: Synthetic oligonucleotide"
  modified_base (20)..(21): a, c, g, u, t, unknown or other
uuuguuagaauuuuugcugnn

SEQ ID NO: 1654 - DNA, 21 bp, Artificial Sequence
  source: /note="Description of Combined DNA/RNA Molecule: Synthetic oligonucleotide"
  source: /note="Description of Artificial Sequence: Synthetic oligonucleotide"
  modified_base (20)..(21): a, c, g, u, t, unknown or other
cagcaaaaauucuaacaaann

SEQ ID NO: 1655 - DNA, 21 bp, Artificial Sequence
  source: /note="Description of Combined DNA/RNA Molecule: Synthetic oligonucleotide"
  source: /note="Description of Artificial Sequence: Synthetic oligonucleotide"
  modified_base (20)..(21): a, c, g, u, t, unknown or other
ggcugcugcuacuauagaann

SEQ ID NO: 1656 - DNA, 21 bp, Artificial Sequence
  source: /note="Description of Combined DNA/RNA Molecule: Synthetic oligonucleotide"
  source: /note="Description of Artificial Sequence: Synthetic oligonucleotide"
  modified_base (20)..(21): a, c, g, u, t, unknown or other
uucuauaguagcagcagccnn

SEQ ID NO: 1657 - DNA, 21 bp, Artificial Sequence
  source: /note="Description of Combined DNA/RNA Molecule: Synthetic oligonucleotide"
  source: /note="Description of Artificial Sequence: Synthetic oligonucleotide"
  modified_base (20)..(21): a, c, g, u, t, unknown or other
uuguuagaauuuuugcuggnn

SEQ ID NO: 1658 - DNA, 21 bp, Artificial Sequence
  source: /note="Description of Combined DNA/RNA Molecule: Synthetic oligonucleotide"
  source: /note="Description of Artificial Sequence: Synthetic oligonucleotide"
  modified_base (20)..(21): a, c, g, u, t, unknown or other
ccagcaaaaauucuaacaann

SEQ ID NO: 1659 - DNA, 21 bp, Artificial Sequence
  source: /note="Description of Combined DNA/RNA Molecule: Synthetic oligonucleotide"
  source: /note="Description of Artificial Sequence: Synthetic oligonucleotide"
  modified_base (20)..(21): a, c, g, u, t, unknown or other
uuuuuuuguguuuucaggunn

SEQ ID NO: 1660 - DNA, 21 bp, Artificial Sequence
  source: /note="Description of Combined DNA/RNA Molecule: Synthetic oligonucleotide"
  source: /note="Description of Artificial Sequence: Synthetic oligonucleotide"
  modified_base (20)..(21): a, c, g, u, t, unknown or other
accugaaaacacaaaaaaann

SEQ ID NO: 1661 - DNA, 21 bp, Artificial Sequence
  source: /note="Description of Combined DNA/RNA Molecule: Synthetic oligonucleotide"
  source: /note="Description of Artificial Sequence: Synthetic oligonucleotide"
  modified_base (20)..(21): a, c, g, u, t, unknown or other
gaaacuacuugggcaauagnn

SEQ ID NO: 1662 - DNA, 21 bp, Artificial Sequence
  source: /note="Description of Combined DNA/RNA Molecule: Synthetic oligonucleotide"
  source: /note="Description of Artificial Sequence: Synthetic oligonucleotide"
  modified_base (20)..(21): a, c, g, u, t, unknown or other
cuauugcccaaguaguuucnn

SEQ ID NO: 1663 - DNA, 21 bp, Artificial Sequence
  source: /note="Description of Combined DNA/RNA Molecule: Synthetic oligonucleotide"
  source: /note="Description of Artificial Sequence: Synthetic oligonucleotide"
  modified_base (20)..(21): a, c, g, u, t, unknown or other
aauggauguugccuuuacunn

SEQ ID NO: 1664 - DNA, 21 bp, Artificial Sequence
  source: /note="Description of Combined DNA/RNA Molecule: Synthetic oligonucleotide"
  source: /note="Description of Artificial Sequence: Synthetic oligonucleotide"
  modified_base (20)..(21): a, c, g, u, t, unknown or other
aguaaaggcaacauccauunn

SEQ ID NO: 1665 - DNA, 21 bp, Artificial Sequence
  source: /note="Description of Combined DNA/RNA Molecule: Synthetic oligonucleotide"
  source: /note="Description of Artificial Sequence: Synthetic oligonucleotide"
  modified_base (20)..(21): a, c, g, u, t, unknown or other
ccucaauggauguugccuunn

SEQ ID NO: 1666 - DNA, 21 bp, Artificial Sequence
  source: /note="Description of Combined DNA/RNA Molecule: Synthetic oligonucleotide"
  source: /note="Description of Artificial Sequence: Synthetic oligonucleotide"
  modified_base (20)..(21): a, c, g, u, t, unknown or other
aaggcaacauccauugaggnn

SEQ ID NO: 1667 - DNA, 21 bp, Artificial Sequence
  source: /note="Description of Combined DNA/RNA Molecule: Synthetic oligonucleotide"
  source: /note="Description of Artificial Sequence: Synthetic oligonucleotide"
  modified_base (20)..(21): a, c, g, u, t, unknown or other
uugccuuuacuuuuagggunn

SEQ ID NO: 1668 - DNA, 21 bp, Artificial Sequence
  source: /note="Description of Combined DNA/RNA Molecule: Synthetic oligonucleotide"
  source: /note="Description of Artificial Sequence: Synthetic oligonucleotide"
  modified_base (20)..(21): a, c, g, u, t, unknown or other
acccuaaaaguaaaggcaann

SEQ ID NO: 1669 - DNA, 21 bp, Artificial Sequence
  source: /note="Description of Combined DNA/RNA Molecule: Synthetic oligonucleotide"
  source: /note="Description of Artificial Sequence: Synthetic oligonucleotide"
  modified_base (20)..(21): a, c, g, u, t, unknown or other
agaaacuacuugggcaauann

SEQ ID NO: 1670 - DNA, 21 bp, Artificial Sequence
  source: /note="Description of Combined DNA/RNA Molecule: Synthetic oligonucleotide"
  source: /note="Description of Artificial Sequence: Synthetic oligonucleotide"
  modified_base (20)..(21): a, c, g, u, t, unknown or other
uauugcccaaguaguuucunn

SEQ ID NO: 1671 - DNA, 21 bp, Artificial Sequence
  source: /note="Description of Combined DNA/RNA Molecule: Synthetic oligonucleotide"
  source: /note="Description of Artificial Sequence: Synthetic oligonucleotide"
  modified_base (20)..(21): a, c, g, u, t, unknown or other
aagaaacuacuugggcaaunn

SEQ ID NO: 1672 - DNA, 21 bp, Artificial Sequence
  source: /note="Description of Combined DNA/RNA Molecule: Synthetic oligonucleotide"
  source: /note="Description of Artificial Sequence: Synthetic oligonucleotide"
  modified_base (20)..(21): a, c, g, u, t, unknown or other
auugcccaaguaguuucuunn

SEQ ID NO: 1673 - DNA, 21 bp, Artificial Sequence
  source: /note="Description of Combined DNA/RNA Molecule: Synthetic oligonucleotide"
  source: /note="Description of Artificial Sequence: Synthetic oligonucleotide"
  modified_base (20)..(21): a, c, g, u, t, unknown or other
ugccuuuacuuuuaggguunn

SEQ ID NO: 1674 - DNA, 21 bp, Artificial Sequence
  source: /note="Description of Combined DNA/RNA Molecule: Synthetic oligonucleotide"
  source: /note="Description of Artificial Sequence: Synthetic oligonucleotide"
  modified_base (20)..(21): a, c, g, u, t, unknown or other
aacccuaaaaguaaaggcann

SEQ ID NO: 1675 - DNA, 21 bp, Artificial Sequence
  source: /note="Description of Combined DNA/RNA Molecule: Synthetic oligonucleotide"
  source: /note="Description of Artificial Sequence: Synthetic oligonucleotide"
  modified_base (20)..(21): a, c, g, u, t, unknown or other
gccuuuacuuuuaggguugnn

SEQ ID NO: 1676 - DNA, 21 bp, Artificial Sequence
  source: /note="Description of Combined DNA/RNA Molecule: Synthetic oligonucleotide"
  source: /note="Description of Artificial Sequence: Synthetic oligonucleotide"
  modified_base (20)..(21): a, c, g, u, t, unknown or other
caacccuaaaaguaaaggcnn

SEQ ID NO: 1677 - DNA, 21 bp, Artificial Sequence
  source: /note="Description of Combined DNA/RNA Molecule: Synthetic oligonucleotide"
  source: /note="Description of Artificial Sequence: Synthetic oligonucleotide"
  modified_base (20)..(21): a, c, g, u, t, unknown or other
cuuuacuuuuaggguuguann

SEQ ID NO: 1678 - DNA, 21 bp, Artificial Sequence
  source: /note="Description of Combined DNA/RNA Molecule: Synthetic oligonucleotide"
  source: /note="Description of Artificial Sequence: Synthetic oligonucleotide"
  modified_base (20)..(21): a, c, g, u, t, unknown or other
uacaacccuaaaaguaaagnn

SEQ ID NO: 1679 - DNA, 21 bp, Artificial Sequence
  source: /note="Description of Combined DNA/RNA Molecule: Synthetic oligonucleotide"
  source: /note="Description of Artificial Sequence: Synthetic oligonucleotide"
  modified_base (20)..(21): a, c, g, u, t, unknown or other
uuuacuuuuaggguuguacnn

SEQ ID NO: 1680 - DNA, 21 bp, Artificial Sequence
  source: /note="Description of Combined DNA/RNA Molecule: Synthetic oligonucleotide"
  source: /note="Description of Artificial Sequence: Synthetic oligonucleotide"
  modified_base (20)..(21): a, c, g, u, t, unknown or other
guacaacccuaaaaguaaann

SEQ ID NO: 1681 - DNA, 21 bp, Artificial Sequence
  source: /note="Description of Combined DNA/RNA Molecule: Synthetic oligonucleotide"
  source: /note="Description of Artificial Sequence: Synthetic oligonucleotide"
  modified_base (20)..(21): a, c, g, u, t, unknown or other
uacuuuuaggguuguacggnn

SEQ ID NO: 1682 - DNA, 21 bp, Artificial Sequence
  source: /note="Description of Combined DNA/RNA Molecule: Synthetic oligonucleotide"
  source: /note="Description of Artificial Sequence: Synthetic oligonucleotide"
  modified_base (20)..(21): a, c, g, u, t, unknown or other
ccguacaacccuaaaaguann

SEQ ID NO: 1683 - DNA, 21 bp, Artificial Sequence
  source: /note="Description of Combined DNA/RNA Molecule: Synthetic oligonucleotide"
  source: /note="Description of Artificial Sequence: Synthetic oligonucleotide"
  modified_base (20)..(21): a, c, g, u, t, unknown or other
ggaagaaacuacuugggcann

SEQ ID NO: 1684 - DNA, 21 bp, Artificial Sequence
  source: /note="Description of Combined DNA/RNA Molecule: Synthetic oligonucleotide"
  source: /note="Description of Artificial Sequence: Synthetic oligonucleotide"
  modified_base (20)..(21): a, c, g, u, t, unknown or other
ugcccaaguaguuucuuccnn

SEQ ID NO: 1685 - DNA, 21 bp, Artificial Sequence
  source: /note="Description of Combined DNA/RNA Molecule: Synthetic oligonucleotide"
  source: /note="Description of Artificial Sequence: Synthetic oligonucleotide"
  modified_base (20)..(21): a, c, g, u, t, unknown or other
caauggauguugccuuuacnn

SEQ ID NO: 1686 - DNA, 21 bp, Artificial Sequence
  source: /note="Description of Combined DNA/RNA Molecule: Synthetic oligonucleotide"
  source: /note="Description of Artificial Sequence: Synthetic oligonucleotide"
  modified_base (20)..(21): a, c, g, u, t, unknown or other
guaaaggcaacauccauugnn

SEQ ID NO: 1687 - DNA, 21 bp, Artificial Sequence
  source: /note="Description of Combined DNA/RNA Molecule: Synthetic oligonucleotide"
  source: /note="Description of Artificial Sequence: Synthetic oligonucleotide"
  modified_base (20)..(21): a, c, g, u, t, unknown or other
ggauguugccuuuacuuuunn

SEQ ID NO: 1688 - DNA, 21 bp, Artificial Sequence
  source: /note="Description of Combined DNA/RNA Molecule: Synthetic oligonucleotide"
  source: /note="Description of Artificial Sequence: Synthetic oligonucleotide"
  modified_base (20)..(21): a, c, g, u, t, unknown or other
aaaaguaaaggcaacauccnn

SEQ ID NO: 1689 - DNA, 21 bp, Artificial Sequence
  source: /note="Description of Combined DNA/RNA Molecule: Synthetic oligonucleotide"
  source: /note="Description of Artificial Sequence: Synthetic oligonucleotide"
  modified_base (20)..(21): a, c, g, u, t, unknown or other
uguugccuuuacuuuuaggnn

SEQ ID NO: 1690 - DNA, 21 bp, Artificial Sequence
  source: /note="Description of Combined DNA/RNA Molecule: Synthetic oligonucleotide"
  source: /note="Description of Artificial Sequence: Synthetic oligonucleotide"
  modified_base (20)..(21): a, c, g, u, t, unknown or other
ccuaaaaguaaaggcaacann

SEQ ID NO: 1691 - DNA, 21 bp, Artificial Sequence
  source: /note="Description of Combined DNA/RNA Molecule: Synthetic oligonucleotide"
  source: /note="Description of Artificial Sequence: Synthetic oligonucleotide"
  modified_base (20)..(21): a, c, g, u, t, unknown or other
gauguugccuuuacuuuuann

SEQ ID NO: 1692 - DNA, 21 bp, Artificial Sequence
  source: /note="Description of Combined DNA/RNA Molecule: Synthetic oligonucleotide"
  source: /note="Description of Artificial Sequence: Synthetic oligonucleotide"
  modified_base (20)..(21): a, c, g, u, t, unknown or other
uaaaaguaaaggcaacaucnn

SEQ ID NO: 1693 - DNA, 21 bp, Artificial Sequence
  source: /note="Description of Combined DNA/RNA Molecule: Synthetic oligonucleotide"
  source: /note="Description of Artificial Sequence: Synthetic oligonucleotide"
  modified_base (20)..(21): a, c, g, u, t, unknown or other
ccagaagacuacuaugauann

SEQ ID NO: 1694 - DNA, 21 bp, Artificial Sequence
  source: /note="Description of Combined DNA/RNA Molecule: Synthetic oligonucleotide"
  source: /note="Description of Artificial Sequence: Synthetic oligonucleotide"
  modified_base (20)..(21): a, c, g, u, t, unknown or other
uaucauaguagucuucuggnn

SEQ ID NO: 1695 - DNA, 21 bp, Artificial Sequence
  source: /note="Description of Combined DNA/RNA Molecule: Synthetic oligonucleotide"
  source: /note="Description of Artificial Sequence: Synthetic oligonucleotide"
  modified_base (20)..(21): a, c, g, u, t, unknown or other
uccagaagacuacuaugaunn

SEQ ID NO: 1696 - DNA, 21 bp, Artificial Sequence
  source: /note="Description of Combined DNA/RNA Molecule: Synthetic oligonucleotide"
  source: /note="Description of Artificial Sequence: Synthetic oligonucleotide"
  modified_base (20)..(21): a, c, g, u, t, unknown or other
aucauaguagucuucuggann

SEQ ID NO: 1697 - DNA, 21 bp, Artificial Sequence
  source: /note="Description of Combined DNA/RNA Molecule: Synthetic oligonucleotide"
  source: /note="Description of Artificial Sequence: Synthetic oligonucleotide"
  modified_base (20)..(21): a, c, g, u, t, unknown or other
uuuggaagaaacuacuuggnn

SEQ ID NO: 1698 - DNA, 21 bp, Artificial Sequence
  source: /note="Description of Combined DNA/RNA Molecule: Synthetic oligonucleotide"
  source: /note="Description of Artificial Sequence: Synthetic oligonucleotide"
  modified_base (20)..(21): a, c, g, u, t, unknown or other
ccaaguaguuucuuccaaann

SEQ ID NO: 1699 - DNA, 21 bp, Artificial Sequence
  source: /note="Description of Combined DNA/RNA Molecule: Synthetic oligonucleotide"
  source: /note="Description of Artificial Sequence: Synthetic oligonucleotide"
  modified_base (20)..(21): a, c, g, u, t, unknown or other
cuccucaauggauguugccnn

SEQ ID NO: 1700 - DNA, 21 bp, Artificial Sequence
  source: /note="Description of Combined DNA/RNA Molecule: Synthetic oligonucleotide"
  source: /note="Description of Artificial Sequence: Synthetic oligonucleotide"
  modified_base (20)..(21): a, c, g, u, t, unknown or other
ggcaacauccauugaggagnn

SEQ ID NO: 1701 - DNA, 21 bp, Artificial Sequence
  source: /note="Description of Combined DNA/RNA Molecule: Synthetic oligonucleotide"
  source: /note="Description of Artificial Sequence: Synthetic oligonucleotide"
  modified_base (20)..(21): a, c, g, u, t, unknown or other
ccaaaugugcaaucuggugnn

SEQ ID NO: 1702 - DNA, 21 bp, Artificial Sequence
  source: /note="Description of Combined DNA/RNA Molecule: Synthetic oligonucleotide"
  source: /note="Description of Artificial Sequence: Synthetic oligonucleotide"
  modified_base (20)..(21): a, c, g, u, t, unknown or other
caccagauugcacauuuggnn

SEQ ID NO: 1703 - DNA, 21 bp, Artificial Sequence
  source: /note="Description of Combined DNA/RNA Molecule: Synthetic oligonucleotide"
  source: /note="Description of Artificial Sequence: Synthetic oligonucleotide"
  modified_base (20)..(21): a, c, g, u, t, unknown or other
caaaugugcaaucuggugann

SEQ ID NO: 1704 - DNA, 21 bp, Artificial Sequence
  source: /note="Description of Combined DNA/RNA Molecule: Synthetic oligonucleotide"
  source: /note="Description of Artificial Sequence: Synthetic oligonucleotide"
  modified_base (20)..(21): a, c, g, u, t, unknown or other
ucaccagauugcacauuugnn

SEQ ID NO: 1705 - DNA, 21 bp, Artificial Sequence
  source: /note="Description of Combined DNA/RNA Molecule: Synthetic oligonucleotide"
  source: /note="Description of Artificial Sequence: Synthetic oligonucleotide"
  modified_base (20)..(21): a, c, g, u, t, unknown or other
agaucugcuccucaauggann

SEQ ID NO: 1706 - DNA, 21 bp, Artificial Sequence
  source: /note="Description of Combined DNA/RNA Molecule: Synthetic oligonucleotide"
  source: /note="Description of Artificial Sequence: Synthetic oligonucleotide"
  modified_base (20)..(21): a, c, g, u, t, unknown or other
uccauugaggagcagaucunn

SEQ ID NO: 1707 - DNA, 21 bp, Artificial Sequence
  source: /note="Description of Combined DNA/RNA Molecule: Synthetic oligonucleotide"
  source: /note="Description of Artificial Sequence: Synthetic oligonucleotide"
  modified_base (20)..(21): a, c, g, u, t, unknown or other
cucaauggauguugccuuunn

SEQ ID NO: 1708 - DNA, 21 bp, Artificial Sequence
  source: /note="Description of Combined DNA/RNA Molecule: Synthetic oligonucleotide"
  source: /note="Description of Artificial Sequence: Synthetic oligonucleotide"
  modified_base (20)..(21): a, c, g, u, t, unknown or other
aaaggcaacauccauugagnn

SEQ ID NO: 1709 - DNA, 21 bp, Artificial Sequence
  source: /note="Description of Combined DNA/RNA Molecule: Synthetic oligonucleotide"
  source: /note="Description of Artificial Sequence: Synthetic oligonucleotide"
  modified_base (20)..(21): a, c, g, u, t, unknown or other
gcucaaauuuuauauaagann

SEQ ID NO: 1710 - DNA, 21 bp, Artificial Sequence
  source: /note="Description of Combined DNA/RNA Molecule: Synthetic oligonucleotide"
  source: /note="Description of Artificial Sequence: Synthetic oligonucleotide"
  modified_base (20)..(21): a, c, g, u, t, unknown or other
ucuuauauaaaauuugagcnn

SEQ ID NO: 1711 - DNA, 21 bp, Artificial Sequence
  source: /note="Description of Combined DNA/RNA Molecule: Synthetic oligonucleotide"
  source: /note="Description of Artificial Sequence: Synthetic oligonucleotide"
  modified_base (20)..(21): a, c, g, u, t, unknown or other
agccugauuuugguacaugnn

SEQ ID NO: 1712 - DNA, 21 bp, Artificial Sequence
  source: /note="Description of Combined DNA/RNA Molecule: Synthetic oligonucleotide"
  source: /note="Description of Artificial Sequence: Synthetic oligonucleotide"
  modified_base (20)..(21): a, c, g, u, t, unknown or other
cauguaccaaaaucaggcunn

SEQ ID NO: 1713 - DNA, 21 bp, Artificial Sequence
  source: /note="Description of Combined DNA/RNA Molecule: Synthetic oligonucleotide"
  source: /note="Description of Artificial Sequence: Synthetic oligonucleotide"
  modified_base (20)..(21): a, c, g, u, t, unknown or other
cucaaauuuuauauaagaann

SEQ ID NO: 1714 - DNA, 21 bp, Artificial Sequence
  source: /note="Description of Combined DNA/RNA Molecule: Synthetic oligonucleotide"
  source: /note="Description of Artificial Sequence: Synthetic oligonucleotide"
  modified_base (20)..(21): a, c, g, u, t, unknown or other
uucuuauauaaaauuugagnn

SEQ ID NO: 1715 - DNA, 21 bp, Artificial Sequence
  source: /note="Description of Combined DNA/RNA Molecule: Synthetic oligonucleotide"
  source: /note="Description of Artificial Sequence: Synthetic oligonucleotide"
  modified_base (20)..(21): a, c, g, u, t, unknown or other
acaaagugcugaauagggann

SEQ ID NO: 1716 - DNA, 21 bp, Artificial Sequence
  source: /note="Description of Combined DNA/RNA Molecule: Synthetic oligonucleotide"
  source: /note="Description of Artificial Sequence: Synthetic oligonucleotide"
  modified_base (20)..(21): a, c, g, u, t, unknown or other
ucccuauucagcacuuugunn

SEQ ID NO: 1717 - DNA, 21 bp, Artificial Sequence
  source: /note="Description of Combined DNA/RNA Molecule: Synthetic oligonucleotide"
  source: /note="Description of Artificial Sequence: Synthetic oligonucleotide"
  modified_base (20)..(21): a, c, g, u, t, unknown or other
cugauuuugguacauggaann

SEQ ID NO: 1718 - DNA, 21 bp, Artificial Sequence
  source: /note="Description of Combined DNA/RNA Molecule: Synthetic oligonucleotide"
  source: /note="Description of Artificial Sequence: Synthetic oligonucleotide"
  modified_base (20)..(21): a, c, g, u, t, unknown or other
uuccauguaccaaaaucagnn

SEQ ID NO: 1719 - DNA, 21 bp, Artificial Sequence
  source: /note="Description of Combined DNA/RNA Molecule: Synthetic oligonucleotide"
  source: /note="Description of Artificial Sequence: Synthetic oligonucleotide"
  modified_base (20)..(21): a, c, g, u, t, unknown or other
gauuuugguacauggaauann

SEQ ID NO: 1720 - DNA, 21 bp, Artificial Sequence
  source: /note="Description of Combined DNA/RNA Molecule: Synthetic oligonucleotide"
  source: /note="Description of Artificial Sequence: Synthetic oligonucleotide"
  modified_base (20)..(21): a, c, g, u, t, unknown or other
uauuccauguaccaaaaucnn

SEQ ID NO: 1721 - DNA, 21 bp, Artificial Sequence
  source: /note="Description of Combined DNA/RNA Molecule: Synthetic oligonucleotide"
  source: /note="Description of Artificial Sequence: Synthetic oligonucleotide"
  modified_base (20)..(21): a, c, g, u, t, unknown or other
cucaucagccugauuuuggnn

SEQ ID NO: 1722 - DNA, 21 bp, Artificial Sequence
  source: /note="Description of Combined DNA/RNA Molecule: Synthetic oligonucleotide"
  source: /note="Description of Artificial Sequence: Synthetic oligonucleotide"
  modified_base (20)..(21): a, c, g, u, t, unknown or other
ccaaaaucaggcugaugagnn

SEQ ID NO: 1723 - DNA, 21 bp, Artificial Sequence
  source: /note="Description of Combined DNA/RNA Molecule: Synthetic oligonucleotide"
  source: /note="Description of Artificial Sequence: Synthetic oligonucleotide"
  modified_base (20)..(21): a, c, g, u, t, unknown or other
agcccacuuguguggauagnn

SEQ ID NO: 1724 - DNA, 21 bp, Artificial Sequence
  source: /note="Description of Combined DNA/RNA Molecule: Synthetic oligonucleotide"
  source: /note="Description of Artificial Sequence: Synthetic oligonucleotide"
  modified_base (20)..(21): a, c, g, u, t, unknown or other
cuauccacacaagugggcunn

SEQ ID NO: 1725 - DNA, 21 bp, Artificial Sequence
  source: /note="Description of Combined DNA/RNA Molecule: Synthetic oligonucleotide"
  source: /note="Description of Artificial Sequence: Synthetic oligonucleotide"
  modified_base (20)..(21): a, c, g, u, t, unknown or other
gugcugaauagggaggaaunn

SEQ ID NO: 1726 - DNA, 21 bp, Artificial Sequence
  source: /note="Description of Combined DNA/RNA Molecule: Synthetic oligonucleotide"
  source: /note="Description of Artificial Sequence: Synthetic oligonucleotide"
  modified_base (20)..(21): a, c, g, u, t, unknown or other
auuccucccuauucagcacnn

SEQ ID NO: 1727 - DNA, 21 bp, Artificial Sequence
  source: /note="Description of Combined DNA/RNA Molecule: Synthetic oligonucleotide"
  source: /note="Description of Artificial Sequence: Synthetic oligonucleotide"
  modified_base (20)..(21): a, c, g, u, t, unknown or other
aguaagggcguggaggcuunn

SEQ ID NO: 1728 - DNA, 21 bp, Artificial Sequence
  source: /note="Description of Combined DNA/RNA Molecule: Synthetic oligonucleotide"
  source: /note="Description of Artificial Sequence: Synthetic oligonucleotide"
  modified_base (20)..(21): a, c, g, u, t, unknown or other
aagccuccacgcccuuacunn

SEQ ID NO: 1729 - DNA, 21 bp, Artificial Sequence
  source: /note="Description of Combined DNA/RNA Molecule: Synthetic oligonucleotide"
  source: /note="Description of Artificial Sequence: Synthetic oligonucleotide"
  modified_base (20)..(21): a, c, g, u, t, unknown or other
gugacuuaacccaagaagcnn

SEQ ID NO: 1730 - DNA, 21 bp, Artificial Sequence
  source: /note="Description of Combined DNA/RNA Molecule: Synthetic oligonucleotide"
  source: /note="Description of Artificial Sequence: Synthetic oligonucleotide"
  modified_base (20)..(21): a, c, g, u, t, unknown or other
gcuucuuggguuaagucacnn

SEQ ID NO: 1731 - DNA, 21 bp, Artificial Sequence
  source: /note="Description of Combined DNA/RNA Molecule: Synthetic oligonucleotide"
  source: /note="Description of Artificial Sequence: Synthetic oligonucleotide"
  modified_base (20)..(21): a, c, g, u, t, unknown or other
uaguaagggcguggaggcunn

SEQ ID NO: 1732 - DNA, 21 bp, Artificial Sequence
  source: /note="Description of Combined DNA/RNA Molecule: Synthetic oligonucleotide"
  source: /note="Description of Artificial Sequence: Synthetic oligonucleotide"
  modified_base (20)..(21): a, c, g, u, t, unknown or other
agccuccacgcccuuacuann

SEQ ID NO: 1733 - DNA, 21 bp, Artificial Sequence
  source: /note="Description of Combined DNA/RNA Molecule: Synthetic oligonucleotide"
  source: /note="Description of Artificial Sequence: Synthetic oligonucleotide"
  modified_base (20)..(21): a, c, g, u, t, unknown or other
ucaucagccugauuuuggunn

SEQ ID NO: 1734 - DNA, 21 bp, Artificial Sequence
  source: /note="Description of Combined DNA/RNA Molecule: Synthetic oligonucleotide"
  source: /note="Description of Artificial Sequence: Synthetic oligonucleotide"
  modified_base (20)..(21): a, c, g, u, t, unknown or other
accaaaaucaggcugaugann

SEQ ID NO: 1735 - DNA, 21 bp, Artificial Sequence
  source: /note="Description of Combined DNA/RNA Molecule: Synthetic oligonucleotide"
  source: /note="Description of Artificial Sequence: Synthetic oligonucleotide"
  modified_base (20)..(21): a, c, g, u, t, unknown or other
guagaagacccuaaagacunn

SEQ ID NO: 1736 - DNA, 21 bp, Artificial Sequence
  source: /note="Description of Combined DNA/RNA Molecule: Synthetic oligonucleotide"
  source: /note="Description of Artificial Sequence: Synthetic oligonucleotide"
  modified_base (20)..(21): a, c, g, u, t, unknown or other
agucuuuagggucuucuacnn

SEQ ID NO: 1737 - DNA, 21 bp, Artificial Sequence
  source: /note="Description of Combined DNA/RNA Molecule: Synthetic oligonucleotide"
  source: /note="Description of Artificial Sequence: Synthetic oligonucleotide"
  modified_base (20)..(21): a, c, g, u, t, unknown or other
agguagaagacccuaaagann

SEQ ID NO: 1738 - DNA, 21 bp, Artificial Sequence
  source: /note="Description of Combined DNA/RNA Molecule: Synthetic oligonucleotide"
  source: /note="Description of Artificial Sequence: Synthetic oligonucleotide"
  modified_base (20)..(21): a, c, g, u, t, unknown or other
ucuuuagggucuucuaccunn

SEQ ID NO: 1739 - DNA, 21 bp, Artificial Sequence
  source: /note="Description of Combined DNA/RNA Molecule: Synthetic oligonucleotide"
  source: /note="Description of Artificial Sequence: Synthetic oligonucleotide"
  modified_base (20)..(21): a, c, g, u, t, unknown or other
aaaagguagaagacccuaann

SEQ ID NO: 1740 - DNA, 21 bp, Artificial Sequence
  source: /note="Description of Combined DNA/RNA Molecule: Synthetic oligonucleotide"
  source: /note="Description of Artificial Sequence: Synthetic oligonucleotide"
  modified_base (20)..(21): a, c, g, u, t, unknown or other
uuagggucuucuaccuuuunn

SEQ ID NO: 1741 - DNA, 21 bp, Artificial Sequence
  source: /note="Description of Combined DNA/RNA Molecule: Synthetic oligonucleotide"
  source: /note="Description of Artificial Sequence: Synthetic oligonucleotide"
  modified_base (20)..(21): a, c, g, u, t, unknown or other
aaagguagaagacccuaaann

SEQ ID NO: 1742 - DNA, 21 bp, Artificial Sequence
  source: /note="Description of Combined DNA/RNA Molecule: Synthetic oligonucleotide"
  source: /note="Description of Artificial Sequence: Synthetic oligonucleotide"
  modified_base (20)..(21): a, c, g, u, t, unknown or other
uuuagggucuucuaccuuunn

SEQ ID NO: 1743 - DNA, 21 bp, Artificial Sequence
  source: /note="Description of Combined DNA/RNA Molecule: Synthetic oligonucleotide"
  source: /note="Description of Artificial Sequence: Synthetic oligonucleotide"
  modified_base (20)..(21): a, c, g, u, t, unknown or other
gauugugcaguggaaagaann

SEQ ID NO: 1744 - DNA, 21 bp, Artificial Sequence
  source: /note="Description of Combined DNA/RNA Molecule: Synthetic oligonucleotide"
  source: /note="Description of Artificial Sequence: Synthetic oligonucleotide"
  modified_base (20)..(21): a, c, g, u, t, unknown or other
uucuuuccacugcacaaucnn

SEQ ID NO: 1745 - DNA, 21 bp, Artificial Sequence
  source: /note="Description of Combined DNA/RNA Molecule: Synthetic oligonucleotide"
  source: /note="Description of Artificial Sequence: Synthetic oligonucleotide"
  modified_base (20)..(21): a, c, g, u, t, unknown or other
ggauugugcaguggaaagann

SEQ ID NO: 1746 - DNA, 21 bp, Artificial Sequence
  source: /note="Description of Combined DNA/RNA Molecule: Synthetic oligonucleotide"
  source: /note="Description of Artificial Sequence: Synthetic oligonucleotide"
  modified_base (20)..(21): a, c, g, u, t, unknown or other
ucuuuccacugcacaauccnn

SEQ ID NO: 1747 - DNA, 21 bp, Artificial Sequence
  source: /note="Description of Combined DNA/RNA Molecule: Synthetic oligonucleotide"
  source: /note="Description of Artificial Sequence: Synthetic oligonucleotide"
  modified_base (20)..(21): a, c, g, u, t, unknown or other
uguagacagccauaugcagnn

SEQ ID NO: 1748 - DNA, 21 bp, Artificial Sequence
  source: /note="Description of Combined DNA/RNA Molecule: Synthetic oligonucleotide"
  source: /note="Description of Artificial Sequence: Synthetic oligonucleotide"
  modified_base (20)..(21): a, c, g, u, t, unknown or other
cugcauauggcugucuacann

SEQ ID NO: 1749 - DNA, 21 bp, Artificial Sequence
  source: /note="Description of Combined DNA/RNA Molecule: Synthetic oligonucleotide"
  source: /note="Description of Artificial Sequence: Synthetic oligonucleotide"
  modified_base (20)..(21): a, c, g, u, t, unknown or other
caugacuuuaacccagaagnn

SEQ ID NO: 1750 - DNA, 21 bp, Artificial Sequence
  source: /note="Description of Combined DNA/RNA Molecule: Synthetic oligonucleotide"
  source: /note="Description of Artificial Sequence: Synthetic oligonucleotide"
  modified_base (20)..(21): a, c, g, u, t, unknown or other
cuucuggguuaaagucaugnn

SEQ ID NO: 1751 - DNA, 21 bp, Artificial Sequence
  source: /note="Description of Combined DNA/RNA Molecule: Synthetic oligonucleotide"
  source: /note="Description of Artificial Sequence: Synthetic oligonucleotide"
  modified_base (20)..(21): a, c, g, u, t, unknown or other
auagggaggaauccauggann

SEQ ID NO: 1752 - DNA, 21 bp, Artificial Sequence
  source: /note="Description of Combined DNA/RNA Molecule: Synthetic oligonucleotide"
  source: /note="Description of Artificial Sequence: Synthetic oligonucleotide"
  modified_base (20)..(21): a, c, g, u, t, unknown or other
uccauggauuccucccuaunn

SEQ ID NO: 1753 - DNA, 21 bp, Artificial Sequence
  source: /note="Description of Combined DNA/RNA Molecule: Synthetic oligonucleotide"
  source: /note="Description of Artificial Sequence: Synthetic oligonucleotide"
  modified_base (20)..(21): a, c, g, u, t, unknown or other
cugaauagggaggaauccann

SEQ ID NO: 1754 - DNA, 21 bp, Artificial Sequence
  source: /note="Description of Combined DNA/RNA Molecule: Synthetic oligonucleotide"
  source: /note="Description of Artificial Sequence: Synthetic oligonucleotide"
  modified_base (20)..(21): a, c, g, u, t, unknown or other
uggauuccucccuauucagnn

SEQ ID NO: 1755 - DNA, 21 bp, Artificial Sequence
  source: /note="Description of Combined DNA/RNA Molecule: Synthetic oligonucleotide"
  source: /note="Description of Artificial Sequence: Synthetic oligonucleotide"
  modified_base (20)..(21): a, c, g, u, t, unknown or other
aaagugcugaauagggaggnn

SEQ ID NO: 1756 - DNA, 21 bp, Artificial Sequence
  source: /note="Description of Combined DNA/RNA Molecule: Synthetic oligonucleotide"
  source: /note="Description of Artificial Sequence: Synthetic oligonucleotide"
  modified_base (20)..(21): a, c, g, u, t, unknown or other
ccucccuauucagcacuuunn

SEQ ID NO: 1757 - DNA, 21 bp, Artificial Sequence
  source: /note="Description of Combined DNA/RNA Molecule: Synthetic oligonucleotide"
  source: /note="Description of Artificial Sequence: Synthetic oligonucleotide"
  modified_base (20)..(21): a, c, g, u, t, unknown or other
ugacuuaacccaagaagcunn

SEQ ID NO: 1758 - DNA, 21 bp, Artificial Sequence
  source: /note="Description of Combined DNA/RNA Molecule: Synthetic oligonucleotide"
  source: /note="Description of Artificial Sequence: Synthetic oligonucleotide"
  modified_base (20)..(21): a, c, g, u, t, unknown or other
agcuucuuggguuaagucann

SEQ ID NO: 1759 - DNA, 21 bp, Artificial Sequence
  source: /note="Description of Combined DNA/RNA Molecule: Synthetic oligonucleotide"
  source: /note="Description of Artificial Sequence: Synthetic oligonucleotide"
  modified_base (20)..(21): a, c, g, u, t, unknown or other
augacuuuaacccagaagann

SEQ ID NO: 1760 - DNA, 21 bp, Artificial Sequence
  source: /note="Description of Combined DNA/RNA Molecule: Synthetic oligonucleotide"
  source: /note="Description of Artificial Sequence: Synthetic oligonucleotide"
  modified_base (20)..(21): a, c, g, u, t, unknown or other
ucuucuggguuaaagucaunn

SEQ ID NO: 1761 - DNA, 21 bp, Artificial Sequence
  source: /note="Description of Combined DNA/RNA Molecule: Synthetic oligonucleotide"
  source: /note="Description of Artificial Sequence: Synthetic oligonucleotide"
  modified_base (20)..(21): a, c, g, u, t, unknown or other
gaagacccuaaagacuuucnn

SEQ ID NO: 1762 - DNA, 21 bp, Artificial Sequence
  source: /note="Description of Combined DNA/RNA Molecule: Synthetic oligonucleotide"
  source: /note="Description of Artificial Sequence: Synthetic oligonucleotide"
  modified_base (20)..(21): a, c, g, u, t, unknown or other
gaaagucuuuagggucuucnn

SEQ ID NO: 1763 - DNA, 21 bp, Artificial Sequence
  source: /note="Description of Combined DNA/RNA Molecule: Synthetic oligonucleotide"
  source: /note="Description of Artificial Sequence: Synthetic oligonucleotide"
  modified_base (20)..(21): a, c, g, u, t, unknown or other
aaaaagcucaaauuuuauann

SEQ ID NO: 1764 - DNA, 21 bp, Artificial Sequence
  source: /note="Description of Combined DNA/RNA Molecule: Synthetic oligonucleotide"
  source: /note="Description of Artificial Sequence: Synthetic oligonucleotide"
  modified_base (20)..(21): a, c, g, u, t, unknown or other
uauaaaauuugagcuuuuunn

SEQ ID NO: 1765 - DNA, 21 bp, Artificial Sequence
  source: /note="Description of Combined DNA/RNA Molecule: Synthetic oligonucleotide"
  source: /note="Description of Artificial Sequence: Synthetic oligonucleotide"
  modified_base (20)..(21): a, c, g, u, t, unknown or other
aucagccugauuuugguacnn

SEQ ID NO: 1766 - DNA, 21 bp, Artificial Sequence
  source: /note="Description of Combined DNA/RNA Molecule: Synthetic oligonucleotide"
  source: /note="Description of Artificial Sequence: Synthetic oligonucleotide"
  modified_base (20)..(21): a, c, g, u, t, unknown or other
guaccaaaaucaggcugaunn

SEQ ID NO: 1767 - DNA, 21 bp, Artificial Sequence
  source: /note="Description of Combined DNA/RNA Molecule: Synthetic oligonucleotide"
  source: /note="Description of Artificial Sequence: Synthetic oligonucleotide"
  modified_base (20)..(21): a, c, g, u, t, unknown or other
caucagccugauuuugguann

SEQ ID NO: 1768 - DNA, 21 bp, Artificial Sequence
  source: /note="Description of Combined DNA/RNA Molecule: Synthetic oligonucleotide"
  source: /note="Description of Artificial Sequence: Synthetic oligonucleotide"
  modified_base (20)..(21): a, c, g, u, t, unknown or other
uaccaaaaucaggcugaugnn

SEQ ID NO: 1769 - DNA, 21 bp, Artificial Sequence
  source: /note="Description of Combined DNA/RNA Molecule: Synthetic oligonucleotide"
  source: /note="Description of Artificial Sequence: Synthetic oligonucleotide"
  modified_base (20)..(21): a, c, g, u, t, unknown or other
auggacaaagugcugaauann

SEQ ID NO: 1770 - DNA, 21 bp, Artificial Sequence
  source: /note="Description of Combined DNA/RNA Molecule: Synthetic oligonucleotide"
  source: /note="Description of Artificial Sequence: Synthetic oligonucleotide"
  modified_base (20)..(21): a, c, g, u, t, unknown or other
uauucagcacuuuguccaunn

SEQ ID NO: 1771 - DNA, 21 bp, Artificial Sequence
  source: /note="Description of Combined DNA/RNA Molecule: Synthetic oligonucleotide"
  source: /note="Description of Artificial Sequence: Synthetic oligonucleotide"
  modified_base (20)..(21): a, c, g, u, t, unknown or other
uagaagacccuaaagacuunn

SEQ ID NO: 1772 - DNA, 21 bp, Artificial Sequence
  source: /note="Description of Combined DNA/RNA Molecule: Synthetic oligonucleotide"
  source: /note="Description of Artificial Sequence: Synthetic oligonucleotide"
  modified_base (20)..(21): a, c, g, u, t, unknown or other
aagucuuuagggucuucuann

SEQ ID NO: 1773 - DNA, 21 bp, Artificial Sequence
  source: /note="Description of Combined DNA/RNA Molecule: Synthetic oligonucleotide"
  source: /note="Description of Artificial Sequence: Synthetic oligonucleotide"
  modified_base (20)..(21): a, c, g, u, t, unknown or other
aagguagaagacccuaaagnn

SEQ ID NO: 1774 - DNA, 21 bp, Artificial Sequence
  source: /note="Description of Combined DNA/RNA Molecule: Synthetic oligonucleotide"
  source: /note="Description of Artificial Sequence: Synthetic oligonucleotide"
  modified_base (20)..(21): a, c, g, u, t, unknown or other
cuuuagggucuucuaccuunn

SEQ ID NO: 1775 - DNA, 21 bp, Artificial Sequence
  source: /note="Description of Combined DNA/RNA Molecule: Synthetic oligonucleotide"
  source: /note="Description of Artificial Sequence: Synthetic oligonucleotide"
  modified_base (20)..(21): a, c, g, u, t, unknown or other
cagcccacuuguguggauann

SEQ ID NO: 1776 - DNA, 21 bp, Artificial Sequence
  source: /note="Description of Combined DNA/RNA Molecule: Synthetic oligonucleotide"
  source: /note="Description of Artificial Sequence: Synthetic oligonucleotide"
  modified_base (20)..(21): a, c, g, u, t, unknown or other
uauccacacaagugggcugnn

SEQ ID NO: 1777 - DNA, 21 bp, Artificial Sequence
  source: /note="Description of Combined DNA/RNA Molecule: Synthetic oligonucleotide"
  source: /note="Description of Artificial Sequence: Synthetic oligonucleotide"
  modified_base (20)..(21): a, c, g, u, t, unknown or other
uuuugguacauggaauagunn

SEQ ID NO: 1778 - DNA, 21 bp, Artificial Sequence
  source: /note="Description of Combined DNA/RNA Molecule: Synthetic oligonucleotide"
  source: /note="Description of Artificial Sequence: Synthetic oligonucleotide"
  modified_base (20)..(21): a, c, g, u, t, unknown or other
acuauuccauguaccaaaann

SEQ ID NO: 1779 - DNA, 21 bp, Artificial Sequence
  source: /note="Description of Combined DNA/RNA Molecule: Synthetic oligonucleotide"
  source: /note="Description of Artificial Sequence: Synthetic oligonucleotide"
  modified_base (20)..(21): a, c, g, u, t, unknown or other
ugaauagggaggaauccaunn

SEQ ID NO: 1780 - DNA, 21 bp, Artificial Sequence
  source: /note="Description of Combined DNA/RNA Molecule: Synthetic oligonucleotide"
  source: /note="Description of Artificial Sequence: Synthetic oligonucleotide"
  modified_base (20)..(21): a, c, g, u, t, unknown or other
auggauuccucccuauucann

SEQ ID NO: 1781 - DNA, 21 bp, Artificial Sequence
  source: /note="Description of Combined DNA/RNA Molecule: Synthetic oligonucleotide"
  source: /note="Description of Artificial Sequence: Synthetic oligonucleotide"
  modified_base (20)..(21): a, c, g, u, t, unknown or other
gcugaauagggaggaauccnn

SEQ ID NO: 1782 - DNA, 21 bp, Artificial Sequence
  source: /note="Description of Combined DNA/RNA Molecule: Synthetic oligonucleotide"
  source: /note="Description of Artificial Sequence: Synthetic oligonucleotide"
  modified_base (20)..(21): a, c, g, u, t, unknown or other
ggauuccucccuauucagcnn

SEQ ID NO: 1783 - DNA, 21 bp, Artificial Sequence
  source: /note="Description of Combined DNA/RNA Molecule: Synthetic oligonucleotide"
  source: /note="Description of Artificial Sequence: Synthetic oligonucleotide"
  modified_base (20)..(21): a, c, g, u, t, unknown or other
ugcugaauagggaggaaucnn

SEQ ID NO: 1784 - DNA, 21 bp, Artificial Sequence
  source: /note="Description of Combined DNA/RNA Molecule: Synthetic oligonucleotide"
  source: /note="Description of Artificial Sequence: Synthetic oligonucleotide"
  modified_base (20)..(21): a, c, g, u, t, unknown or other
gauuccucccuauucagcann

SEQ ID NO: 1785 - DNA, 21 bp, Artificial Sequence
  source: /note="Description of Combined DNA/RNA Molecule: Synthetic oligonucleotide"
  source: /note="Description of Artificial Sequence: Synthetic oligonucleotide"
  modified_base (20)..(21): a, c, g, u, t, unknown or other
uguguagacagccauaugcnn

SEQ ID NO: 1786 - DNA, 21 bp, Artificial Sequence
  source: /note="Description of Combined DNA/RNA Molecule: Synthetic oligonucleotide"
  source: /note="Description of Artificial Sequence: Synthetic oligonucleotide"
  modified_base (20)..(21): a, c, g, u, t, unknown or other
gcauauggcugucuacacann

SEQ ID NO: 1787 - DNA, 21 bp, Artificial Sequence
  source: /note="Description of Combined DNA/RNA Molecule: Synthetic oligonucleotide"
  source: /note="Description of Artificial Sequence: Synthetic oligonucleotide"
  modified_base (20)..(21): a, c, g, u, t, unknown or other
ugcuuugauugcuucagacnn

SEQ ID NO: 1788 - DNA, 21 bp, Artificial Sequence
  source: /note="Description of Combined DNA/RNA Molecule: Synthetic oligonucleotide"
  source: /note="Description of Artificial Sequence: Synthetic oligonucleotide"
  modified_base (20)..(21): a, c, g, u, t, unknown or other
gucugaagcaaucaaagcann

SEQ ID NO: 1789 - DNA, 21 bp, Artificial Sequence
  source: /note="Description of Combined DNA/RNA Molecule: Synthetic oligonucleotide"
  source: /note="Description of Artificial Sequence: Synthetic oligonucleotide"
  modified_base (20)..(21): a, c, g, u, t, unknown or other
uugcuuugauugcuucagann

SEQ ID NO: 1790 - DNA, 21 bp, Artificial Sequence
  source: /note="Description of Combined DNA/RNA Molecule: Synthetic oligonucleotide"
  source: /note="Description of Artificial Sequence: Synthetic oligonucleotide"
  modified_base (20)..(21): a, c, g, u, t, unknown or other
ucugaagcaaucaaagcaann

SEQ ID NO: 1791 - DNA, 21 bp, Artificial Sequence
  source: /note="Description of Combined DNA/RNA Molecule: Synthetic oligonucleotide"
  source: /note="Description of Artificial Sequence: Synthetic oligonucleotide"
  modified_base (20)..(21): a, c, g, u, t, unknown or other
auugcuuugauugcuucagnn

SEQ ID NO: 1792 - DNA, 21 bp, Artificial Sequence
  source: /note="Description of Combined DNA/RNA Molecule: Synthetic oligonucleotide"
  source: /note="Description of Artificial Sequence: Synthetic oligonucleotide"
  modified_base (20)..(21): a, c, g, u, t, unknown or other
cugaagcaaucaaagcaaunn

SEQ ID NO: 1793 - DNA, 21 bp, Artificial Sequence
  source: /note="Description of Combined DNA/RNA Molecule: Synthetic oligonucleotide"
  source: /note="Description of Artificial Sequence: Synthetic oligonucleotide"
  modified_base (20)..(21): a, c, g, u, t, unknown or other
cuauugcuuugauugcuucnn

SEQ ID NO: 1794 - DNA, 21 bp, Artificial Sequence
  source: /note="Description of Combined DNA/RNA Molecule: Synthetic oligonucleotide"
  source: /note="Description of Artificial Sequence: Synthetic oligonucleotide"
  modified_base (20)..(21): a, c, g, u, t, unknown or other
gaagcaaucaaagcaauagnn

SEQ ID NO: 1795 - DNA, 21 bp, Artificial Sequence
  source: /note="Description of Combined DNA/RNA Molecule: Synthetic oligonucleotide"
  source: /note="Description of Artificial Sequence: Synthetic oligonucleotide"
  modified_base (20)..(21): a, c, g, u, t, unknown or other
auugcaaggaauggccuaann

SEQ ID NO: 1796 - DNA, 21 bp, Artificial Sequence
  source: /note="Description of Combined DNA/RNA Molecule: Synthetic oligonucleotide"
  source: /note="Description of Artificial Sequence: Synthetic oligonucleotide"
  modified_base (20)..(21): a, c, g, u, t, unknown or other
uuaggccauuccuugcaaunn

SEQ ID NO: 1797 - DNA, 21 bp, Artificial Sequence
  source: /note="Description of Combined DNA/RNA Molecule: Synthetic oligonucleotide"
  source: /note="Description of Artificial Sequence: Synthetic oligonucleotide"
  modified_base (20)..(21): a, c, g, u, t, unknown or other
auuuuccuccuaauucugann

SEQ ID NO: 1798 - DNA, 21 bp, Artificial Sequence
  source: /note="Description of Combined DNA/RNA Molecule: Synthetic oligonucleotide"
  source: /note="Description of Artificial Sequence: Synthetic oligonucleotide"
  modified_base (20)..(21): a, c, g, u, t, unknown or other
ucagaauuaggaggaaaaunn

SEQ ID NO: 1799 - DNA, 21 bp, Artificial Sequence
  source: /note="Description of Combined DNA/RNA Molecule: Synthetic oligonucleotide"
  source: /note="Description of Artificial Sequence: Synthetic oligonucleotide"
  modified_base (20)..(21): a, c, g, u, t, unknown or other
gcucaucagccugauuuugnn

SEQ ID NO: 1800 - DNA, 21 bp, Artificial Sequence
  source: /note="Description of Combined DNA/RNA Molecule: Synthetic oligonucleotide"
  source: /note="Description of Artificial Sequence: Synthetic oligonucleotide"
  modified_base (20)..(21): a, c, g, u, t, unknown or other
caaaaucaggcugaugagcnn

SEQ ID NO: 1801 - DNA, 21 bp, Artificial Sequence
  source: /note="Description of Combined DNA/RNA Molecule: Synthetic oligonucleotide"
  source: /note="Description of Artificial Sequence: Synthetic oligonucleotide"
  modified_base (20)..(21): a, c, g, u, t, unknown or other
ugcucaucagccugauuuunn

SEQ ID NO: 1802 - DNA, 21 bp, Artificial Sequence
  source: /note="Description of Combined DNA/RNA Molecule: Synthetic oligonucleotide"
  source: /note="Description of Artificial Sequence: Synthetic oligonucleotide"
  modified_base (20)..(21): a, c, g, u, t, unknown or other
aaaaucaggcugaugagcann

SEQ ID NO: 1803 - DNA, 21 bp, Artificial Sequence
  source: /note="Description of Combined DNA/RNA Molecule: Synthetic oligonucleotide"
  source: /note="Description of Artificial Sequence: Synthetic oligonucleotide"
  modified_base (20)..(21): a, c, g, u, t, unknown or other
aguugcucaucagccugaunn

SEQ ID NO: 1804 - DNA, 21 bp, Artificial Sequence
  source: /note="Description of Combined DNA/RNA Molecule: Synthetic oligonucleotide"
  source: /note="Description of Artificial Sequence: Synthetic oligonucleotide"
  modified_base (20)..(21): a, c, g, u, t, unknown or other
aucaggcugaugagcaacunn

SEQ ID NO: 1805 - DNA, 21 bp, Artificial Sequence
  source: /note="Description of Combined DNA/RNA Molecule: Synthetic oligonucleotide"
  source: /note="Description of Artificial Sequence: Synthetic oligonucleotide"
  modified_base (20)..(21): a, c, g, u, t, unknown or other
aagggcguggaggcuuuuunn

SEQ ID NO: 1806 - DNA, 21 bp, Artificial Sequence
  source: /note="Description of Combined DNA/RNA Molecule: Synthetic oligonucleotide"
  source: /note="Description of Artificial Sequence: Synthetic oligonucleotide"
  modified_base (20)..(21): a, c, g, u, t, unknown or other
aaaaagccuccacgcccuunn

SEQ ID NO: 1807 - DNA, 21 bp, Artificial Sequence
  source: /note="Description of Combined DNA/RNA Molecule: Synthetic oligonucleotide"
  source: /note="Description of Artificial Sequence: Synthetic oligonucleotide"
  modified_base (20)..(21): a, c, g, u, t, unknown or other
guaagggcguggaggcuuunn

SEQ ID NO: 1808 - DNA, 21 bp, Artificial Sequence
  source: /note="Description of Combined DNA/RNA Molecule: Synthetic oligonucleotide"
  source: /note="Description of Artificial Sequence: Synthetic oligonucleotide"
  modified_base (20)..(21): a, c, g, u, t, unknown or other
aaagccuccacgcccuuacnn

SEQ ID NO: 1809 - DNA, 21 bp, Artificial Sequence
  source: /note="Description of Combined DNA/RNA Molecule: Synthetic oligonucleotide"
  source: /note="Description of Artificial Sequence: Synthetic oligonucleotide"
  modified_base (20)..(21): a, c, g, u, t, unknown or other
gacccuaaagacuuuccugnn

SEQ ID NO: 1810 - DNA, 21 bp, Artificial Sequence
  source: /note="Description of Combined DNA/RNA Molecule: Synthetic oligonucleotide"
  source: /note="Description of Artificial Sequence: Synthetic oligonucleotide"
  modified_base (20)..(21): a, c, g, u, t, unknown or other
caggaaagucuuuagggucnn

SEQ ID NO: 1811 - DNA, 21 bp, Artificial Sequence
  source: /note="Description of Combined DNA/RNA Molecule: Synthetic oligonucleotide"
  source: /note="Description of Artificial Sequence: Synthetic oligonucleotide"
  modified_base (20)..(21): a, c, g, u, t, unknown or other
aggagcaugacuuuaacccnn

SEQ ID NO: 1812 - DNA, 21 bp, Artificial Sequence
  source: /note="Description of Combined DNA/RNA Molecule: Synthetic oligonucleotide"
  source: /note="Description of Artificial Sequence: Synthetic oligonucleotide"
  modified_base (20)..(21): a, c, g, u, t, unknown or other
ggguuaaagucaugcuccunn

SEQ ID NO: 1813 - DNA, 21 bp, Artificial Sequence
  source: /note="Description of Combined DNA/RNA Molecule: Synthetic oligonucleotide"
  source: /note="Description of Artificial Sequence: Synthetic oligonucleotide"
  modified_base (20)..(21): a, c, g, u, t, unknown or other
ugugauuuuccuccuaauunn

SEQ ID NO: 1814 - DNA, 21 bp, Artificial Sequence
  source: /note="Description of Combined DNA/RNA Molecule: Synthetic oligonucleotide"
  source: /note="Description of Artificial Sequence: Synthetic oligonucleotide"
  modified_base (20)..(21): a, c, g, u, t, unknown or other
aauuaggaggaaaaucacann

SEQ ID NO: 1815 - DNA, 21 bp, Artificial Sequence
  source: /note="Description of Combined DNA/RNA Molecule: Synthetic oligonucleotide"
  source: /note="Description of Artificial Sequence: Synthetic oligonucleotide"
  modified_base (20)..(21): a, c, g, u, t, unknown or other
uugugauuuuccuccuaaunn

SEQ ID NO: 1816 - DNA, 21 bp, Artificial Sequence
  source: /note="Description of Combined DNA/RNA Molecule: Synthetic oligonucleotide"
  source: /note="Description of Artificial Sequence: Synthetic oligonucleotide"
  modified_base (20)..(21): a, c, g, u, t, unknown or other
auuaggaggaaaaucacaann

SEQ ID NO: 1817 - DNA, 21 bp, Artificial Sequence
  source: /note="Description of Combined DNA/RNA Molecule: Synthetic oligonucleotide"
  source: /note="Description of Artificial Sequence: Synthetic oligonucleotide"
  modified_base (20)..(21): a, c, g, u, t, unknown or other
gacuuaacccaagaagcucnn

SEQ ID NO: 1818 - DNA, 21 bp, Artificial Sequence
  source: /note="Description of Combined DNA/RNA Molecule: Synthetic oligonucleotide"
  source: /note="Description of Artificial Sequence: Synthetic oligonucleotide"
  modified_base (20)..(21): a, c, g, u, t, unknown or other
gagcuucuuggguuaagucnn

SEQ ID NO: 1819 - DNA, 21 bp, Artificial Sequence
  source: /note="Description of Combined DNA/RNA Molecule: Synthetic oligonucleotide"
  source: /note="Description of Artificial Sequence: Synthetic oligonucleotide"
  modified_base (20)..(21): a, c, g, u, t, unknown or other
gcuucagacaaugguuuggnn

SEQ ID NO: 1820 - DNA, 21 bp, Artificial Sequence
  source: /note="Description of Combined DNA/RNA Molecule: Synthetic oligonucleotide"
  source: /note="Description of Artificial Sequence: Synthetic oligonucleotide"
  modified_base (20)..(21): a, c, g, u, t, unknown or other
ccaaaccauugucugaagcnn

SEQ ID NO: 1821 - DNA, 21 bp, Artificial Sequence
  source: /note="Description of Combined DNA/RNA Molecule: Synthetic oligonucleotide"
  source: /note="Description of Artificial Sequence: Synthetic oligonucleotide"
  modified_base (20)..(21): a, c, g, u, t, unknown or other
uugcuucagacaaugguuunn

SEQ ID NO: 1822 - DNA, 21 bp, Artificial Sequence
  source: /note="Description of Combined DNA/RNA Molecule: Synthetic oligonucleotide"
  source: /note="Description of Artificial Sequence: Synthetic oligonucleotide"
  modified_base (20)..(21): a, c, g, u, t, unknown or other
aaaccauugucugaagcaann

SEQ ID NO: 1823 - DNA, 21 bp, Artificial Sequence
  source: /note="Description of Combined DNA/RNA Molecule: Synthetic oligonucleotide"
  source: /note="Description of Artificial Sequence: Synthetic oligonucleotide"
  modified_base (20)..(21): a, c, g, u, t, unknown or other
auugcuucagacaaugguunn

SEQ ID NO: 1824 - DNA, 21 bp, Artificial Sequence
  source: /note="Description of Combined DNA/RNA Molecule: Synthetic oligonucleotide"
  source: /note="Description of Artificial Sequence: Synthetic oligonucleotide"
  modified_base (20)..(21): a, c, g, u, t, unknown or other
aaccauugucugaagcaaunn

SEQ ID NO: 1825 - DNA, 21 bp, Artificial Sequence
  source: /note="Description of Combined DNA/RNA Molecule: Synthetic oligonucleotide"
  source: /note="Description of Artificial Sequence: Synthetic oligonucleotide"
  modified_base (20)..(21): a, c, g, u, t, unknown or other
uugauugcuucagacaaugnn

SEQ ID NO: 1826 - DNA, 21 bp, Artificial Sequence
  source: /note="Description of Combined DNA/RNA Molecule: Synthetic oligonucleotide"
  source: /note="Description of Artificial Sequence: Synthetic oligonucleotide"
  modified_base (20)..(21): a, c, g, u, t, unknown or other
cauugucugaagcaaucaann

SEQ ID NO: 1827 - DNA, 21 bp, Artificial Sequence
  source: /note="Description of Combined DNA/RNA Molecule: Synthetic oligonucleotide"
  source: /note="Description of Artificial Sequence: Synthetic oligonucleotide"
  modified_base (20)..(21): a, c, g, u, t, unknown or other
gacaaagugcugaauagggnn

SEQ ID NO: 1828 - DNA, 21 bp, Artificial Sequence
  source: /note="Description of Combined DNA/RNA Molecule: Synthetic oligonucleotide"
  source: /note="Description of Artificial Sequence: Synthetic oligonucleotide"
  modified_base (20)..(21): a, c, g, u, t, unknown or other
cccuauucagcacuuugucnn

SEQ ID NO: 1829 - DNA, 21 bp, Artificial Sequence
  source: /note="Description of Combined DNA/RNA Molecule: Synthetic oligonucleotide"
  source: /note="Description of Artificial Sequence: Synthetic oligonucleotide"
  modified_base (20)..(21): a, c, g, u, t, unknown or other
aagaaaaagcucaaauuuunn

SEQ ID NO: 1830 - DNA, 21 bp, Artificial Sequence
  source: /note="Description of Combined DNA/RNA Molecule: Synthetic oligonucleotide"
  source: /note="Description of Artificial Sequence: Synthetic oligonucleotide"
  modified_base (20)..(21): a, c, g, u, t, unknown or other
aaaauuugagcuuuuucuunn

SEQ ID NO: 1831 - DNA, 21 bp, Artificial Sequence
  source: /note="Description of Combined DNA/RNA Molecule: Synthetic oligonucleotide"
  source: /note="Description of Artificial Sequence: Synthetic oligonucleotide"
  modified_base (20)..(21): a, c, g, u, t, unknown or other
aaagaaaaagcucaaauuunn

SEQ ID NO: 1832 - DNA, 21 bp, Artificial Sequence
  source: /note="Description of Combined DNA/RNA Molecule: Synthetic oligonucleotide"
  source: /note="Description of Artificial Sequence: Synthetic oligonucleotide"
  modified_base (20)..(21): a, c, g, u, t, unknown or other
aaauuugagcuuuuucuuunn

SEQ ID NO: 1833 - DNA, 21 bp, Artificial Sequence
  source: /note="Description of Combined DNA/RNA Molecule: Synthetic oligonucleotide"
  source: /note="Description of Artificial Sequence: Synthetic oligonucleotide"
  modified_base (20)..(21): a, c, g, u, t, unknown or other
agaagacccuaaagacuuunn

SEQ ID NO: 1834 - DNA, 21 bp, Artificial Sequence
  source: /note="Description of Combined DNA/RNA Molecule: Synthetic oligonucleotide"
  source: /note="Description of Artificial Sequence: Synthetic oligonucleotide"
  modified_base (20)..(21): a, c, g, u, t, unknown or other
aaagucuuuagggucuucunn

SEQ ID NO: 1835 - DNA, 21 bp, Artificial Sequence
  source: /note="Description of Combined DNA/RNA Molecule: Synthetic oligonucleotide"
  source: /note="Description of Artificial Sequence: Synthetic oligonucleotide"
  modified_base (20)..(21): a, c, g, u, t, unknown or other
aaaaaaaagguagaagaccnn

SEQ ID NO: 1836 - DNA, 21 bp, Artificial Sequence
  source: /note="Description of Combined DNA/RNA Molecule: Synthetic oligonucleotide"
  source: /note="Description of Artificial Sequence: Synthetic oligonucleotide"
  modified_base (20)..(21): a, c, g, u, t, unknown or other
ggucuucuaccuuuuuuuunn

SEQ ID NO: 1837 - DNA, 21 bp, Artificial Sequence
  source: /note="Description of Combined DNA/RNA Molecule: Synthetic oligonucleotide"
  source: /note="Description of Artificial Sequence: Synthetic oligonucleotide"
  modified_base (20)..(21): a, c, g, u, t, unknown or other
gguagaagacccuaaagacnn

SEQ ID NO: 1838 - DNA, 21 bp, Artificial Sequence
  source: /note="Description of Combined DNA/RNA Molecule: Synthetic oligonucleotide"
  source: /note="Description of Artificial Sequence: Synthetic oligonucleotide"
  modified_base (20)..(21): a, c, g, u, t, unknown or other
gucuuuagggucuucuaccnn

SEQ ID NO: 1839 - DNA, 21 bp, Artificial Sequence
  source: /note="Description of Combined DNA/RNA Molecule: Synthetic oligonucleotide"
  source: /note="Description of Artificial Sequence: Synthetic oligonucleotide"
  modified_base (20)..(21): a, c, g, u, t, unknown or other
aaaaaagguagaagacccunn

SEQ ID NO: 1840 - DNA, 21 bp, Artificial Sequence
  source: /note="Description of Combined DNA/RNA Molecule: Synthetic oligonucleotide"
  source: /note="Description of Artificial Sequence: Synthetic oligonucleotide"
  modified_base (20)..(21): a, c, g, u, t, unknown or other
agggucuucuaccuuuuuunn

SEQ ID NO: 1841 - DNA, 21 bp, Artificial Sequence
  source: /note="Description of Combined DNA/RNA Molecule: Synthetic oligonucleotide"
  source: /note="Description of Artificial Sequence: Synthetic oligonucleotide"
  modified_base (20)..(21): a, c, g, u, t, unknown or other
aaaaagguagaagacccuann

SEQ ID NO: 1842 - DNA, 21 bp, Artificial Sequence
  source: /note="Description of Combined DNA/RNA Molecule: Synthetic oligonucleotide"
  source: /note="Description of Artificial Sequence: Synthetic oligonucleotide"
  modified_base (20)..(21): a, c, g, u, t, unknown or other
uagggucuucuaccuuuuunn

SEQ ID NO: 1843 - DNA, 21 bp, Artificial Sequence
  source: /note="Description of Combined DNA/RNA Molecule: Synthetic oligonucleotide"
  source: /note="Description of Artificial Sequence: Synthetic oligonucleotide"
  modified_base (20)..(21): a, c, g, u, t, unknown or other
uuaacccaagaagcucuucnn

SEQ ID NO: 1844 - DNA, 21 bp, Artificial Sequence
  source: /note="Description of Combined DNA/RNA Molecule: Synthetic oligonucleotide"
  source: /note="Description of Artificial Sequence: Synthetic oligonucleotide"
  modified_base (20)..(21): a, c, g, u, t, unknown or other
gaagagcuucuuggguuaann

SEQ ID NO: 1845 - DNA, 21 bp, Artificial Sequence
  source: /note="Description of Combined DNA/RNA Molecule: Synthetic oligonucleotide"
  source: /note="Description of Artificial Sequence: Synthetic oligonucleotide"
  modified_base (20)..(21): a, c, g, u, t, unknown or other
auuuugguacauggaauagnn

SEQ ID NO: 1846 - DNA, 21 bp, Artificial Sequence
  source: /note="Description of Combined DNA/RNA Molecule: Synthetic oligonucleotide"
  source: /note="Description of Artificial Sequence: Synthetic oligonucleotide"
  modified_base (20)..(21): a, c, g, u, t, unknown or other
cuauuccauguaccaaaaunn

SEQ ID NO: 1847 - DNA, 21 bp, Artificial Sequence
  source: /note="Description of Combined DNA/RNA Molecule: Synthetic oligonucleotide"
  source: /note="Description of Artificial Sequence: Synthetic oligonucleotide"
  modified_base (20)..(21): a, c, g, u, t, unknown or other
agugcugaauagggaggaann

SEQ ID NO: 1848 - DNA, 21 bp, Artificial Sequence
  source: /note="Description of Combined DNA/RNA Molecule: Synthetic oligonucleotide"
  source: /note="Description of Artificial Sequence: Synthetic oligonucleotide"
  modified_base (20)..(21): a, c, g, u, t, unknown or other
uuccucccuauucagcacunn

SEQ ID NO: 1849 - DNA, 21 bp, Artificial Sequence
  source: /note="Description of Combined DNA/RNA Molecule: Synthetic oligonucleotide"
  source: /note="Description of Artificial Sequence: Synthetic oligonucleotide"
  modified_base (20)..(21): a, c, g, u, t, unknown or other
gaggccagggaaauucccunn

SEQ ID NO: 1850 - DNA, 21 bp, Artificial Sequence
  source: /note="Description of Combined DNA/RNA Molecule: Synthetic oligonucleotide"
  source: /note="Description of Artificial Sequence: Synthetic oligonucleotide"
  modified_base (20)..(21): a, c, g, u, t, unknown or other
agggaauuucccuggccucnn

SEQ ID NO: 1851 - DNA, 21 bp, Artificial Sequence
  source: /note="Description of Combined DNA/RNA Molecule: Synthetic oligonucleotide"
  source: /note="Description of Artificial Sequence: Synthetic oligonucleotide"
  modified_base (20)..(21): a, c, g, u, t, unknown or other
agcucaaauuuuauauaagnn

SEQ ID NO: 1852 - DNA, 21 bp, Artificial Sequence
  source: /note="Description of Combined DNA/RNA Molecule: Synthetic oligonucleotide"
  source: /note="Description of Artificial Sequence: Synthetic oligonucleotide"
  modified_base (20)..(21): a, c, g, u, t, unknown or other
cuuauauaaaauuugagcunn

SEQ ID NO: 1853 - DNA, 21 bp, Artificial Sequence
  source: /note="Description of Combined DNA/RNA Molecule: Synthetic oligonucleotide"
  source: /note="Description of Artificial Sequence: Synthetic oligonucleotide"
  modified_base (20)..(21): a, c, g, u, t, unknown or other
cagggaaauucccuuguuunn

SEQ ID NO: 1854 - DNA, 21 bp, Artificial Sequence
  source: /note="Description of Combined DNA/RNA Molecule: Synthetic oligonucleotide"
  source: /note="Description of Artificial Sequence: Synthetic oligonucleotide"
  modified_base (20)..(21): a, c, g, u, t, unknown or other
aaacaagggaauuucccugnn

SEQ ID NO: 1855 - DNA, 21 bp, Artificial Sequence
  source: /note="Description of Combined DNA/RNA Molecule: Synthetic oligonucleotide"
  source: /note="Description of Artificial Sequence: Synthetic oligonucleotide"
  modified_base (20)..(21): a, c, g, u, t, unknown or other
uugugcaguggaaagaaagnn

SEQ ID NO: 1856 - DNA, 21 bp, Artificial Sequence
  source: /note="Description of Combined DNA/RNA Molecule: Synthetic oligonucleotide"
  source: /note="Description of Artificial Sequence: Synthetic oligonucleotide"
  modified_base (20)..(21): a, c, g, u, t, unknown or other
cuuucuuuccacugcacaann

SEQ ID NO: 1857 - DNA, 21 bp, Artificial Sequence
  source: /note="Description of Combined DNA/RNA Molecule: Synthetic oligonucleotide"
  source: /note="Description of Artificial Sequence: Synthetic oligonucleotide"
  modified_base (20)..(21): a, c, g, u, t, unknown or other
uacauggaauaguucagagnn

SEQ ID NO: 1858 - DNA, 21 bp, Artificial Sequence
  source: /note="Description of Combined DNA/RNA Molecule: Synthetic oligonucleotide"
  source: /note="Description of Artificial Sequence: Synthetic oligonucleotide"
  modified_base (20)..(21): a, c, g, u, t, unknown or other
cucugaacuauuccauguann

SEQ ID NO: 1859 - DNA, 21 bp, Artificial Sequence
  source: /note="Description of Combined DNA/RNA Molecule: Synthetic oligonucleotide"
  source: /note="Description of Artificial Sequence: Synthetic oligonucleotide"
  modified_base (20)..(21): a, c, g, u, t, unknown or other
guacauggaauaguucagann

SEQ ID NO: 1860 - DNA, 21 bp, Artificial Sequence
  source: /note="Description of Combined DNA/RNA Molecule: Synthetic oligonucleotide"
  source: /note="Description of Artificial Sequence: Synthetic oligonucleotide"
  modified_base (20)..(21): a, c, g, u, t, unknown or other
ucugaacuauuccauguacnn

SEQ ID NO: 1861 - DNA, 21 bp, Artificial Sequence
  source: /note="Description of Combined DNA/RNA Molecule: Synthetic oligonucleotide"
  source: /note="Description of Artificial Sequence: Synthetic oligonucleotide"
  modified_base (20)..(21): a, c, g, u, t, unknown or other
agggaaauucccuuguuuunn

SEQ ID NO: 1862 - DNA, 21 bp, Artificial Sequence
  source: /note="Description of Combined DNA/RNA Molecule: Synthetic oligonucleotide"
  source: /note="Description of Artificial Sequence: Synthetic oligonucleotide"
  modified_base (20)..(21): a, c, g, u, t, unknown or other
aaaacaagggaauuucccunn

SEQ ID NO: 1863 - DNA, 21 bp, Artificial Sequence
  source: /note="Description of Combined DNA/RNA Molecule: Synthetic oligonucleotide"
  source: /note="Description of Artificial Sequence: Synthetic oligonucleotide"
  modified_base (20)..(21): a, c, g, u, t, unknown or other
ggaggccagggaaauucccnn

SEQ ID NO: 1864 - DNA, 21 bp, Artificial Sequence
  source: /note="Description of Combined DNA/RNA Molecule: Synthetic oligonucleotide"
  source: /note="Description of Artificial Sequence: Synthetic oligonucleotide"
  modified_base (20)..(21): a, c, g, u, t, unknown or other
gggaauuucccuggccuccnn

SEQ ID NO: 1865 - DNA, 21 bp, Artificial Sequence
  source: /note="Description of Combined DNA/RNA Molecule: Synthetic oligonucleotide"
  source: /note="Description of Artificial Sequence: Synthetic oligonucleotide"
  modified_base (20)..(21): a, c, g, u, t, unknown or other
guguagacagccauaugcann

SEQ ID NO: 1866 - DNA, 21 bp, Artificial Sequence
  source: /note="Description of Combined DNA/RNA Molecule: Synthetic oligonucleotide"
  source: /note="Description of Artificial Sequence: Synthetic oligonucleotide"
  modified_base (20)..(21): a, c, g, u, t, unknown or other
ugcauauggcugucuacacnn

SEQ ID NO: 1867 - DNA, 21 bp, Artificial Sequence
  source: /note="Description of Combined DNA/RNA Molecule: Synthetic oligonucleotide"
  source: /note="Description of Artificial Sequence: Synthetic oligonucleotide"
  modified_base (20)..(21): a, c, g, u, t, unknown or other
guagacagccauaugcagunn

SEQ ID NO: 1868 - DNA, 21 bp, Artificial Sequence
  source: /note="Description of Combined DNA/RNA Molecule: Synthetic oligonucleotide"
  source: /note="Description of Artificial Sequence: Synthetic oligonucleotide"
  modified_base (20)..(21): a, c, g, u, t, unknown or other
acugcauauggcugucuacnn

SEQ ID NO: 1869 - DNA, 21 bp, Artificial Sequence
  source: /note="Description of Combined DNA/RNA Molecule: Synthetic oligonucleotide"
  source: /note="Description of Artificial Sequence: Synthetic oligonucleotide"
  modified_base (20)..(21): a, c, g, u, t, unknown or other
gaagaccuguuuugccaugnn

SEQ ID NO: 1870 - DNA, 21 bp, Artificial Sequence
  source: /note="Description of Combined DNA/RNA Molecule: Synthetic oligonucleotide"
  source: /note="Description of Artificial Sequence: Synthetic oligonucleotide"
  modified_base (20)..(21): a, c, g, u, t, unknown or other
cauggcaaaacaggucuucnn

SEQ ID NO: 1871 - DNA, 21 bp, Artificial Sequence
  source: /note="Description of Combined DNA/RNA Molecule: Synthetic oligonucleotide"
  source: /note="Description of Artificial Sequence: Synthetic oligonucleotide"
  modified_base (20)..(21): a, c, g, u, t, unknown or other
agugggaugaagaccuguunn

SEQ ID NO: 1872 - DNA, 21 bp, Artificial Sequence
  source: /note="Description of Combined DNA/RNA Molecule: Synthetic oligonucleotide"
  source: /note="Description of Artificial Sequence: Synthetic oligonucleotide"
  modified_base (20)..(21): a, c, g, u, t, unknown or other
aacaggucuucaucccacunn

SEQ ID NO: 1873 - DNA, 21 bp, Artificial Sequence
  source: /note="Description of Combined DNA/RNA Molecule: Synthetic oligonucleotide"
  source: /note="Description of Artificial Sequence: Synthetic oligonucleotide"
  modified_base (20)..(21): a, c, g, u, t, unknown or other
ugaagaccuguuuugccaunn

SEQ ID NO: 1874 - DNA, 21 bp, Artificial Sequence
  source: /note="Description of Combined DNA/RNA Molecule: Synthetic oligonucleotide"
  source: /note="Description of Artificial Sequence: Synthetic oligonucleotide"
  modified_base (20)..(21): a, c, g, u, t, unknown or other
auggcaaaacaggucuucann

SEQ ID NO: 1875 - DNA, 21 bp, Artificial Sequence
  source: /note="Description of Combined DNA/RNA Molecule: Synthetic oligonucleotide"
  source: /note="Description of Artificial Sequence: Synthetic oligonucleotide"
  modified_base (20)..(21): a, c, g, u, t, unknown or other
ugggaugaagaccuguuuunn

SEQ ID NO: 1876 - DNA, 21 bp, Artificial Sequence
  source: /note="Description of Combined DNA/RNA Molecule: Synthetic oligonucleotide"
  source: /note="Description of Artificial Sequence: Synthetic oligonucleotide"
  modified_base (20)..(21): a, c, g, u, t, unknown or other
aaaacaggucuucaucccann

SEQ ID NO: 1877 - DNA, 21 bp, Artificial Sequence
  source: /note="Description of Combined DNA/RNA Molecule: Synthetic oligonucleotide"
  source: /note="Description of Artificial Sequence: Synthetic oligonucleotide"
  modified_base (20)..(21): a, c, g, u, t, unknown or other
cuuaacccaagaagcucuunn

SEQ ID NO: 1878 - DNA, 21 bp, Artificial Sequence
  source: /note="Description of Combined DNA/RNA Molecule: Synthetic oligonucleotide"
  source: /note="Description of Artificial Sequence: Synthetic oligonucleotide"
  modified_base (20)..(21): a, c, g, u, t, unknown or other
aagagcuucuuggguuaagnn

SEQ ID NO: 1879 - DNA, 21 bp, Artificial Sequence
  source: /note="Description of Combined DNA/RNA Molecule: Synthetic oligonucleotide"
  source: /note="Description of Artificial Sequence: Synthetic oligonucleotide"
  modified_base (20)..(21): a, c, g, u, t, unknown or other
auugugcaguggaaagaaann

SEQ ID NO: 1880 - DNA, 21 bp, Artificial Sequence
  source: /note="Description of Combined DNA/RNA Molecule: Synthetic oligonucleotide"
  source: /note="Description of Artificial Sequence: Synthetic oligonucleotide"
  modified_base (20)..(21): a, c, g, u, t, unknown or other
uuucuuuccacugcacaaunn

SEQ ID NO: 1881 - DNA, 21 bp, Artificial Sequence
  source: /note="Description of Combined DNA/RNA Molecule: Synthetic oligonucleotide"
  source: /note="Description of Artificial Sequence: Synthetic oligonucleotide"
  modified_base (20)..(21): a, c, g, u, t, unknown or other
cuuuauugcaaggaauggcnn

SEQ ID NO: 1882 - DNA, 21 bp, Artificial Sequence
  source: /note="Description of Combined DNA/RNA Molecule: Synthetic oligonucleotide"
  source: /note="Description of Artificial Sequence: Synthetic oligonucleotide"
  modified_base (20)..(21): a, c, g, u, t, unknown or other
gccauuccuugcaauaaagnn

SEQ ID NO: 1883 - DNA, 21 bp, Artificial Sequence
  source: /note="Description of Combined DNA/RNA Molecule: Synthetic oligonucleotide"
  source: /note="Description of Artificial Sequence: Synthetic oligonucleotide"
  modified_base (20)..(21): a, c, g, u, t, unknown or other
gagcaugacuuuaacccagnn

SEQ ID NO: 1884 - DNA, 21 bp, Artificial Sequence
  source: /note="Description of Combined DNA/RNA Molecule: Synthetic oligonucleotide"
  source: /note="Description of Artificial Sequence: Synthetic oligonucleotide"
  modified_base (20)..(21): a, c, g, u, t, unknown or other
cuggguuaaagucaugcucnn

SEQ ID NO: 1885 - DNA, 21 bp, Artificial Sequence
  source: /note="Description of Combined DNA/RNA Molecule: Synthetic oligonucleotide"
  source: /note="Description of Artificial Sequence: Synthetic oligonucleotide"
  modified_base (20)..(21): a, c, g, u, t, unknown or other
gugauuuuccuccuaauucnn

SEQ ID NO: 1886 - DNA, 21 bp, Artificial Sequence
  source: /note="Description of Combined DNA/RNA Molecule: Synthetic oligonucleotide"
  source: /note="Description of Artificial Sequence: Synthetic oligonucleotide"
  modified_base (20)..(21): a, c, g, u, t, unknown or other
gaauuaggaggaaaaucacnn

SEQ ID NO: 1887 - DNA, 21 bp, Artificial Sequence
  source: /note="Description of Combined DNA/RNA Molecule: Synthetic oligonucleotide"
  source: /note="Description of Artificial Sequence: Synthetic oligonucleotide"
  modified_base (20)..(21): a, c, g, u, t, unknown or other
ugauugcuucagacaauggnn

SEQ ID NO: 1888 - DNA, 21 bp, Artificial Sequence
  source: /note="Description of Combined DNA/RNA Molecule: Synthetic oligonucleotide"
  source: /note="Description of Artificial Sequence: Synthetic oligonucleotide"
  modified_base (20)..(21): a, c, g, u, t, unknown or other
ccauugucugaagcaaucann

SEQ ID NO: 1889 - DNA, 21 bp, Artificial Sequence
  source: /note="Description of Combined DNA/RNA Molecule: Synthetic oligonucleotide"
  source: /note="Description of Artificial Sequence: Synthetic oligonucleotide"
  modified_base (20)..(21): a, c, g, u, t, unknown or other
aagcucaaauuuuauauaann

SEQ ID NO: 1890 - DNA, 21 bp, Artificial Sequence
  source: /note="Description of Combined DNA/RNA Molecule: Synthetic oligonucleotide"
  source: /note="Description of Artificial Sequence: Synthetic oligonucleotide"
  modified_base (20)..(21): a, c, g, u, t, unknown or other
uuauauaaaauuugagcuunn

SEQ ID NO: 1891 - DNA, 21 bp, Artificial Sequence
  source: /note="Description of Combined DNA/RNA Molecule: Synthetic oligonucleotide"
  source: /note="Description of Artificial Sequence: Synthetic oligonucleotide"
  modified_base (20)..(21): a, c, g, u, t, unknown or other
cuggacauggaucaagcacnn

SEQ ID NO: 1892 - DNA, 21 bp, Artificial Sequence
  source: /note="Description of Combined DNA/RNA Molecule: Synthetic oligonucleotide"
  source: /note="Description of Artificial Sequence: Synthetic oligonucleotide"
  modified_base (20)..(21): a, c, g, u, t, unknown or other
gugcuugauccauguccagnn

SEQ ID NO: 1893 - DNA, 21 bp, Artificial Sequence
  source: /note="Description of Combined DNA/RNA Molecule: Synthetic oligonucleotide"
  source: /note="Description of Artificial Sequence: Synthetic oligonucleotide"
  modified_base (20)..(21): a, c, g, u, t, unknown or other
ucaaauuuuauauaagaaann

SEQ ID NO: 1894 - DNA, 21 bp, Artificial Sequence
  source: /note="Description of Combined DNA/RNA Molecule: Synthetic oligonucleotide"
  source: /note="Description of Artificial Sequence: Synthetic oligonucleotide"
  modified_base (20)..(21): a, c, g, u, t, unknown or other
uuucuuauauaaaauuugann

SEQ ID NO: 1895 - DNA, 21 bp, Artificial Sequence
  source: /note="Description of Combined DNA/RNA Molecule: Synthetic oligonucleotide"
  source: /note="Description of Artificial Sequence: Synthetic oligonucleotide"
  modified_base (20)..(21): a, c, g, u, t, unknown or other
ugugcaguggaaagaaaggnn

SEQ ID NO: 1896 - DNA, 21 bp, Artificial Sequence
  source: /note="Description of Combined DNA/RNA Molecule: Synthetic oligonucleotide"
  source: /note="Description of Artificial Sequence: Synthetic oligonucleotide"
  modified_base (20)..(21): a, c, g, u, t, unknown or other
ccuuucuuuccacugcacann

SEQ ID NO: 1897 - DNA, 21 bp, Artificial Sequence
  source: /note="Description of Combined DNA/RNA Molecule: Synthetic oligonucleotide"
  source: /note="Description of Artificial Sequence: Synthetic oligonucleotide"
  modified_base (20)..(21): a, c, g, u, t, unknown or other
uugguacauggaauaguucnn

SEQ ID NO: 1898 - DNA, 21 bp, Artificial Sequence
  source: /note="Description of Combined DNA/RNA Molecule: Synthetic oligonucleotide"
  source: /note="Description of Artificial Sequence: Synthetic oligonucleotide"
  modified_base (20)..(21): a, c, g, u, t, unknown or other
gaacuauuccauguaccaann

SEQ ID NO: 1899 - DNA, 21 bp, Artificial Sequence
  source: /note="Description of Combined DNA/RNA Molecule: Synthetic oligonucleotide"
  source: /note="Description of Artificial Sequence: Synthetic oligonucleotide"
  modified_base (20)..(21): a, c, g, u, t, unknown or other
aagugggaugaagaccugunn

SEQ ID NO: 1900 - DNA, 21 bp, Artificial Sequence
  source: /note="Description of Combined DNA/RNA Molecule: Synthetic oligonucleotide"
  source: /note="Description of Artificial Sequence: Synthetic oligonucleotide"
  modified_base (20)..(21): a, c, g, u, t, unknown or other
acaggucuucaucccacuunn

SEQ ID NO: 1901 - DNA, 21 bp, Artificial Sequence
  source: /note="Description of Combined DNA/RNA Molecule: Synthetic oligonucleotide"
  source: /note="Description of Artificial Sequence: Synthetic oligonucleotide"
  modified_base (20)..(21): a, c, g, u, t, unknown or other
ggaugaagaccuguuuugcnn

SEQ ID NO: 1902 - DNA, 21 bp, Artificial Sequence
  source: /note="Description of Combined DNA/RNA Molecule: Synthetic oligonucleotide"
  source: /note="Description of Artificial Sequence: Synthetic oligonucleotide"
  modified_base (20)..(21): a, c, g, u, t, unknown or other
gcaaaacaggucuucauccnn

SEQ ID NO: 1903 - DNA, 21 bp, Artificial Sequence
  source: /note="Description of Combined DNA/RNA Molecule: Synthetic oligonucleotide"
  source: /note="Description of Artificial Sequence: Synthetic oligonucleotide"
  modified_base (20)..(21): a, c, g, u, t, unknown or other
ucuggacauggaucaagcann

SEQ ID NO: 1904 - DNA, 21 bp, Artificial Sequence
  source: /note="Description of Combined DNA/RNA Molecule: Synthetic oligonucleotide"
  source: /note="Description of Artificial Sequence: Synthetic oligonucleotide"
  modified_base (20)..(21): a, c, g, u, t, unknown or other
ugcuugauccauguccagann

SEQ ID NO: 1905 - DNA, 21 bp, Artificial Sequence
  source: /note="Description of Combined DNA/RNA Molecule: Synthetic oligonucleotide"
  source: /note="Description of Artificial Sequence: Synthetic oligonucleotide"
  modified_base (20)..(21): a, c, g, u, t, unknown or other
uuugguacauggaauaguunn

SEQ ID NO: 1906 - DNA, 21 bp, Artificial Sequence
  source: /note="Description of Combined DNA/RNA Molecule: Synthetic oligonucleotide"
  source: /note="Description of Artificial Sequence: Synthetic oligonucleotide"
  modified_base (20)..(21): a, c, g, u, t, unknown or other
aacuauuccauguaccaaann

SEQ ID NO: 1907 - DNA, 21 bp, Artificial Sequence
  source: /note="Description of Combined DNA/RNA Molecule: Synthetic oligonucleotide"
  source: /note="Description of Artificial Sequence: Synthetic oligonucleotide"
  modified_base (20)..(21): a, c, g, u, t, unknown or other
acuuuuaggguuguacgggnn

SEQ ID NO: 1908 - DNA, 21 bp, Artificial Sequence
  source: /note="Description of Combined DNA/RNA Molecule: Synthetic oligonucleotide"
  source: /note="Description of Artificial Sequence: Synthetic oligonucleotide"
  modified_base (20)..(21): a, c, g, u, t, unknown or other
cccguacaacccuaaaagunn

SEQ ID NO: 1909 - DNA, 21 bp, Artificial Sequence
  source: /note="Description of Combined DNA/RNA Molecule: Synthetic oligonucleotide"
  source: /note="Description of Artificial Sequence: Synthetic oligonucleotide"
  modified_base (20)..(21): a, c, g, u, t, unknown or other
cuuuuaggguuguacgggann

SEQ ID NO: 1910 - DNA, 21 bp, Artificial Sequence
  source: /note="Description of Combined DNA/RNA Molecule: Synthetic oligonucleotide"
  source: /note="Description of Artificial Sequence: Synthetic oligonucleotide"
  modified_base (20)..(21): a, c, g, u, t, unknown or other
ucccguacaacccuaaaagnn

SEQ ID NO: 1911 - DNA, 21 bp, Artificial Sequence
  source: /note="Description of Combined DNA/RNA Molecule: Synthetic oligonucleotide"
  source: /note="Description of Artificial Sequence: Synthetic oligonucleotide"
  modified_base (20)..(21): a, c, g, u, t, unknown or other
cagagcacaaggcguaccunn

SEQ ID NO: 1912 - DNA, 21 bp, Artificial Sequence
  source: /note="Description of Combined DNA/RNA Molecule: Synthetic oligonucleotide"
  source: /note="Description of Artificial Sequence: Synthetic oligonucleotide"
  modified_base (20)..(21): a, c, g, u, t, unknown or other
agguacgccuugugcucugnn

SEQ ID NO: 1913 - DNA, 20 bp, Artificial Sequence
  source: /note="Description of Combined DNA/RNA Molecule: Synthetic oligonucleotide"
  source: /note="Description of Artificial Sequence: Synthetic oligonucleotide"
  modified_base (19)..(20): a, c, g, u, t, unknown or other
uaggguuguacgggacugnn

SEQ ID NO: 1914 - DNA, 21 bp, Artificial Sequence
  source: /note="Description of Combined DNA/RNA Molecule: Synthetic oligonucleotide"
  source: /note="Description of Artificial Sequence: Synthetic oligonucleotide"
  modified_base (20)..(21): a, c, g, u, t, unknown or other
acagucccguacaacccuann

SEQ ID NO: 1915 - DNA, 21 bp, Artificial Sequence
  source: /note="Description of Combined DNA/RNA Molecule: Synthetic oligonucleotide"
  source: /note="Description of Artificial Sequence: Synthetic oligonucleotide"
  modified_base (20)..(21): a, c, g, u, t, unknown or other
aggguuguacgggacuguann

SEQ ID NO: 1916 - DNA, 21 bp, Artificial Sequence
  source: /note="Description of Combined DNA/RNA Molecule: Synthetic oligonucleotide"
  source: /note="Description of Artificial Sequence: Synthetic oligonucleotide"
  modified_base (20)..(21): a, c, g, u, t, unknown or other
uacagucccguacaacccunn

SEQ ID NO: 1917 - DNA, 21 bp, Artificial Sequence
  source: /note="Description of Combined DNA/RNA Molecule: Synthetic oligonucleotide"
  source: /note="Description of Artificial Sequence: Synthetic oligonucleotide"
  modified_base (20)..(21): a, c, g, u, t, unknown or other
uuguacgggacuguaacacnn

SEQ ID NO: 1918 - DNA, 21 bp, Artificial Sequence
  source: /note="Description of Combined DNA/RNA Molecule: Synthetic oligonucleotide"
  source: /note="Description of Artificial Sequence: Synthetic oligonucleotide"
  modified_base (20)..(21): a, c, g, u, t, unknown or other
guguuacagucccguacaann

SEQ ID NO: 1919 - DNA, 21 bp, Artificial Sequence
  source: /note="Description of Combined DNA/RNA Molecule: Synthetic oligonucleotide"
  source: /note="Description of Artificial Sequence: Synthetic oligonucleotide"
  modified_base (20)..(21): a, c, g, u, t, unknown or other
gccugauuuugguacauggnn

SEQ ID NO: 1920 - DNA, 21 bp, Artificial Sequence
  source: /note="Description of Combined DNA/RNA Molecule: Synthetic oligonucleotide"
  source: /note="Description of Artificial Sequence: Synthetic oligonucleotide"
  modified_base (20)..(21): a, c, g, u, t, unknown or other
ccauguaccaaaaucaggcnn

SEQ ID NO: 1921 - DNA, 21 bp, Artificial Sequence
  source: /note="Description of Combined DNA/RNA Molecule: Synthetic oligonucleotide"
  source: /note="Description of Artificial Sequence: Synthetic oligonucleotide"
  modified_base (20)..(21): a, c, g, u, t, unknown or other
gaaguaguaagggcguggann

SEQ ID NO: 1922 - DNA, 21 bp, Artificial Sequence
  source: /note="Description of Combined DNA/RNA Molecule: Synthetic oligonucleotide"
  source: /note="Description of Artificial Sequence: Synthetic oligonucleotide"
  modified_base (20)..(21): a, c, g, u, t, unknown or other
uccacgcccuuacuacuucnn

SEQ ID NO: 1923 - DNA, 21 bp, Artificial Sequence
  source: /note="Description of Combined DNA/RNA Molecule: Synthetic oligonucleotide"
  source: /note="Description of Artificial Sequence: Synthetic oligonucleotide"
  modified_base (20)..(21): a, c, g, u, t, unknown or other
auaggccuuacuccugaaann

SEQ ID NO: 1924 - DNA, 21 bp, Artificial Sequence
  source: /note="Description of Combined DNA/RNA Molecule: Synthetic oligonucleotide"
  source: /note="Description of Artificial Sequence: Synthetic oligonucleotide"
  modified_base (20)..(21): a, c, g, u, t, unknown or other
uuucaggaguaaggccuaunn

SEQ ID NO: 1925 - DNA, 21 bp, Artificial Sequence
  source: /note="Description of Combined DNA/RNA Molecule: Synthetic oligonucleotide"
  source: /note="Description of Artificial Sequence: Synthetic oligonucleotide"
  modified_base (20)..(21): a, c, g, u, t, unknown or other
gacagccauaugcaguagunn

SEQ ID NO: 1926 - DNA, 21 bp, Artificial Sequence
  source: /note="Description of Combined DNA/RNA Molecule: Synthetic oligonucleotide"
  source: /note="Description of Artificial Sequence: Synthetic oligonucleotide"
  modified_base (20)..(21): a, c, g, u, t, unknown or other
acuacugcauauggcugucnn

SEQ ID NO: 1927 - DNA, 21 bp, Artificial Sequence
  source: /note="Description of Combined DNA/RNA Molecule: Synthetic oligonucleotide"
  source: /note="Description of Artificial Sequence: Synthetic oligonucleotide"
  modified_base (20)..(21): a, c, g, u, t, unknown or other
aaacuacuugggcaauagunn

SEQ ID NO: 1928 - DNA, 21 bp, Artificial Sequence
  source: /note="Description of Combined DNA/RNA Molecule: Synthetic oligonucleotide"
  source: /note="Description of Artificial Sequence: Synthetic oligonucleotide"
  modified_base (20)..(21): a, c, g, u, t, unknown or other
acuauugcccaaguaguuunn

SEQ ID NO: 1929 - DNA, 21 bp, Artificial Sequence
  source: /note="Description of Combined DNA/RNA Molecule: Synthetic oligonucleotide"
  source: /note="Description of Artificial Sequence: Synthetic oligonucleotide"
  modified_base (20)..(21): a, c, g, u, t, unknown or other
ucagguucaugggugccgcnn

SEQ ID NO: 1930 - DNA, 21 bp, Artificial Sequence
  source: /note="Description of Combined DNA/RNA Molecule: Synthetic oligonucleotide"
  source: /note="Description of Artificial Sequence: Synthetic oligonucleotide"
  modified_base (20)..(21): a, c, g, u, t, unknown or other
gcggcacccaugaaccugann

SEQ ID NO: 1931 - DNA, 21 bp, Artificial Sequence
  source: /note="Description of Combined DNA/RNA Molecule: Synthetic oligonucleotide"
  source: /note="Description of Artificial Sequence: Synthetic oligonucleotide"
  modified_base (20)..(21): a, c, g, u, t, unknown or other
guaguaagggcguggaggcnn

SEQ ID NO: 1932 - DNA, 21 bp, Artificial Sequence
  source: /note="Description of Combined DNA/RNA Molecule: Synthetic oligonucleotide"
  source: /note="Description of Artificial Sequence: Synthetic oligonucleotide"
  modified_base (20)..(21): a, c, g, u, t, unknown or other
gccuccacgcccuuacuacnn

SEQ ID NO: 1933 - DNA, 21 bp, Artificial Sequence
  source: /note="Description of Combined DNA/RNA Molecule: Synthetic oligonucleotide"
  source: /note="Description of Artificial Sequence: Synthetic oligonucleotide"
  modified_base (20)..(21): a, c, g, u, t, unknown or other
uauugcaaggaauggccuann

SEQ ID NO: 1934 - DNA, 21 bp, Artificial Sequence
  source: /note="Description of Combined DNA/RNA Molecule: Synthetic oligonucleotide"
  source: /note="Description of Artificial Sequence: Synthetic oligonucleotide"
  modified_base (20)..(21): a, c, g, u, t, unknown or other
uaggccauuccuugcaauann

SEQ ID NO: 1935 - DNA, 21 bp, Artificial Sequence
  source: /note="Description of Combined DNA/RNA Molecule: Synthetic oligonucleotide"
  source: /note="Description of Artificial Sequence: Synthetic oligonucleotide"
  modified_base (20)..(21): a, c, g, u, t, unknown or other
aguaguaagggcguggaggnn

SEQ ID NO: 1936 - DNA, 21 bp, Artificial Sequence
  source: /note="Description of Combined DNA/RNA Molecule: Synthetic oligonucleotide"
  source: /note="Description of Artificial Sequence: Synthetic oligonucleotide"
  modified_base (20)..(21): a, c, g, u, t, unknown or other
ccuccacgcccuuacuacunn

SEQ ID NO: 1937 - DNA, 21 bp, Artificial Sequence
  source: /note="Description of Combined DNA/RNA Molecule: Synthetic oligonucleotide"
  source: /note="Description of Artificial Sequence: Synthetic oligonucleotide"
  modified_base (20)..(21): a, c, g, u, t, unknown or other
ugcuauugcuuugauugcunn

SEQ ID NO: 1938 - DNA, 21 bp, Artificial Sequence
  source: /note="Description of Combined DNA/RNA Molecule: Synthetic oligonucleotide"
  source: /note="Description of Artificial Sequence: Synthetic oligonucleotide"
  modified_base (20)..(21): a, c, g, u, t, unknown or other
agcaaucaaagcaauagcann

SEQ ID NO: 1939 - DNA, 21 bp, Artificial Sequence
  source: /note="Description of Combined DNA/RNA Molecule: Synthetic oligonucleotide"
  source: /note="Description of Artificial Sequence: Synthetic oligonucleotide"
  modified_base (20)..(21): a, c, g, u, t, unknown or other
gcuauugcuuugauugcuunn

SEQ ID NO: 1940 - DNA, 21 bp, Artificial Sequence
  source: /note="Description of Combined DNA/RNA Molecule: Synthetic oligonucleotide"
  source: /note="Description of Artificial Sequence: Synthetic oligonucleotide"
  modified_base (20)..(21): a, c, g, u, t, unknown or other
aagcaaucaaagcaauagcnn

SEQ ID NO: 1941 - DNA, 21 bp, Artificial Sequence
  source: /note="Description of Combined DNA/RNA Molecule: Synthetic oligonucleotide"
  source: /note="Description of Artificial Sequence: Synthetic oligonucleotide"
  modified_base (20)..(21): a, c, g, u, t, unknown or other
ccuuuacuuuuaggguugunn

SEQ ID NO: 1942 - DNA, 21 bp, Artificial Sequence
  source: /note="Description of Combined DNA/RNA Molecule: Synthetic oligonucleotide"
  source: /note="Description of Artificial Sequence: Synthetic oligonucleotide"
  modified_base (20)..(21): a, c, g, u, t, unknown or other
acaacccuaaaaguaaaggnn

SEQ ID NO: 1943 - DNA, 21 bp, Artificial Sequence
  source: /note="Description of Combined DNA/RNA Molecule: Synthetic oligonucleotide"
  source: /note="Description of Artificial Sequence: Synthetic oligonucleotide"
  modified_base (20)..(21): a, c, g, u, t, unknown or other
uuacuuuuaggguuguacgnn

SEQ ID NO: 1944 - DNA, 21 bp, Artificial Sequence
  source: /note="Description of Combined DNA/RNA Molecule: Synthetic oligonucleotide"
  source: /note="Description of Artificial Sequence: Synthetic oligonucleotide"
  modified_base (20)..(21): a, c, g, u, t, unknown or other
cguacaacccuaaaaguaann

SEQ ID NO: 1945 - DNA, 21 bp, Artificial Sequence
  source: /note="Description of Combined DNA/RNA Molecule: Synthetic oligonucleotide"
  source: /note="Description of Artificial Sequence: Synthetic oligonucleotide"
  modified_base (20)..(21): a, c, g, u, t, unknown or other
gcuccucaauggauguugcnn

SEQ ID NO: 1946 - DNA, 21 bp, Artificial Sequence
  source: /note="Description of Combined DNA/RNA Molecule: Synthetic oligonucleotide"
  source: /note="Description of Artificial Sequence: Synthetic oligonucleotide"
  modified_base (20)..(21): a, c, g, u, t, unknown or other
gcaacauccauugaggagcnn

SEQ ID NO: 1947 - DNA, 21 bp, Artificial Sequence
  source: /note="Description of Combined DNA/RNA Molecule: Synthetic oligonucleotide"
  source: /note="Description of Artificial Sequence: Synthetic oligonucleotide"
  modified_base (20)..(21): a, c, g, u, t, unknown or other
aaguaguaagggcguggagnn

SEQ ID NO: 1948 - DNA, 21 bp, Artificial Sequence
  source: /note="Description of Combined DNA/RNA Molecule: Synthetic oligonucleotide"
  source: /note="Description of Artificial Sequence: Synthetic oligonucleotide"
  modified_base (20)..(21): a, c, g, u, t, unknown or other
cuccacgcccuuacuacuunn

SEQ ID NO: 1949 - DNA, 21 bp, Artificial Sequence
  source: /note="Description of Combined DNA/RNA Molecule: Synthetic oligonucleotide"
  source: /note="Description of Artificial Sequence: Synthetic oligonucleotide"
  modified_base (20)..(21): a, c, g, u, t, unknown or other
uuaggguuguacgggacugnn

SEQ ID NO: 1950 - DNA, 21 bp, Artificial Sequence
  source: /note="Description of Combined DNA/RNA Molecule: Synthetic oligonucleotide"
  source: /note="Description of Artificial Sequence: Synthetic oligonucleotide"
  modified_base (20)..(21): a, c, g, u, t, unknown or other
cagucccguacaacccuaann

SEQ ID NO: 1951 - DNA, 21 bp, Artificial Sequence
  source: /note="Description of Combined DNA/RNA Molecule: Synthetic oligonucleotide"
  source: /note="Description of Artificial Sequence: Synthetic oligonucleotide"
  modified_base (20)..(21): a, c, g, u, t, unknown or other
gacaugcuuccuuguuacann

SEQ ID NO: 1952 - DNA, 21 bp, Artificial Sequence
  source: /note="Description of Combined DNA/RNA Molecule: Synthetic oligonucleotide"
  source: /note="Description of Artificial Sequence: Synthetic oligonucleotide"
  modified_base (20)..(21): a, c, g, u, t, unknown or other
uguaacaaggaagcaugucnn

SEQ ID NO: 1953 - DNA, 21 bp, Artificial Sequence
  source: /note="Description of Combined DNA/RNA Molecule: Synthetic oligonucleotide"
  source: /note="Description of Artificial Sequence: Synthetic oligonucleotide"
  modified_base (20)..(21): a, c, g, u, t, unknown or other
uguugaauguuggguuccunn

SEQ ID NO: 1954 - DNA, 21 bp, Artificial Sequence
  source: /note="Description of Combined DNA/RNA Molecule: Synthetic oligonucleotide"
  source: /note="Description of Artificial Sequence: Synthetic oligonucleotide"
  modified_base (20)..(21): a, c, g, u, t, unknown or other
aggaacccaacauucaacann

SEQ ID NO: 1955 - DNA, 21 bp, Artificial Sequence
  source: /note="Description of Combined DNA/RNA Molecule: Synthetic oligonucleotide"
  source: /note="Description of Artificial Sequence: Synthetic oligonucleotide"
  modified_base (20)..(21): a, c, g, u, t, unknown or other
acuuaacccaagaagcucunn

SEQ ID NO: 1956 - DNA, 21 bp, Artificial Sequence
  source: /note="Description of Combined DNA/RNA Molecule: Synthetic oligonucleotide"
  source: /note="Description of Artificial Sequence: Synthetic oligonucleotide"
  modified_base (20)..(21): a, c, g, u, t, unknown or other
agagcuucuuggguuaagunn

SEQ ID NO: 1957 - DNA, 21 bp, Artificial Sequence
  source: /note="Description of Combined DNA/RNA Molecule: Synthetic oligonucleotide"
  source: /note="Description of Artificial Sequence: Synthetic oligonucleotide"
  modified_base (20)..(21): a, c, g, u, t, unknown or other
ucagccugauuuugguacann

SEQ ID NO: 1958 - DNA, 21 bp, Artificial Sequence
  source: /note="Description of Combined DNA/RNA Molecule: Synthetic oligonucleotide"
  source: /note="Description of Artificial Sequence: Synthetic oligonucleotide"
  modified_base (20)..(21): a, c, g, u, t, unknown or other
uguaccaaaaucaggcugann

SEQ ID NO: 1959 - DNA, 21 bp, Artificial Sequence
  source: /note="Description of Combined DNA/RNA Molecule: Synthetic oligonucleotide"
  source: /note="Description of Artificial Sequence: Synthetic oligonucleotide"
  modified_base (20)..(21): a, c, g, u, t, unknown or other
uuuuaggguuguacgggacnn

SEQ ID NO: 1960 - DNA, 21 bp, Artificial Sequence
  source: /note="Description of Combined DNA/RNA Molecule: Synthetic oligonucleotide"
  source: /note="Description of Artificial Sequence: Synthetic oligonucleotide"
  modified_base (20)..(21): a, c, g, u, t, unknown or other
gucccguacaacccuaaaann

SEQ ID NO: 1961 - DNA, 21 bp, Artificial Sequence
  source: /note="Description of Combined DNA/RNA Molecule: Synthetic oligonucleotide"
  source: /note="Description of Artificial Sequence: Synthetic oligonucleotide"
  modified_base (20)..(21): a, c, g, u, t, unknown or other
uuuaggguuguacgggacunn

SEQ ID NO: 1962 - DNA, 21 bp, Artificial Sequence
  source: /note="Description of Combined DNA/RNA Molecule: Synthetic oligonucleotide"
  source: /note="Description of Artificial Sequence: Synthetic oligonucleotide"
  modified_base (20)..(21): a, c, g, u, t, unknown or other
agucccguacaacccuaaann

SEQ ID NO: 1963 - DNA, 21 bp, Artificial Sequence
  source: /note="Description of Combined DNA/RNA Molecule: Synthetic oligonucleotide"
  source: /note="Description of Artificial Sequence: Synthetic oligonucleotide"
  modified_base (20)..(21): a, c, g, u, t, unknown or other
ucccuugcuacuguagaggnn

SEQ ID NO: 1964 - DNA, 21 bp, Artificial Sequence
  source: /note="Description of Combined DNA/RNA Molecule: Synthetic oligonucleotide"
  source: /note="Description of Artificial Sequence: Synthetic oligonucleotide"
  modified_base (20)..(21): a, c, g, u, t, unknown or other
ccucuacaguagcaagggann

SEQ ID NO: 1965 - DNA, 21 bp, Artificial Sequence
  source: /note="Description of Combined DNA/RNA Molecule: Synthetic oligonucleotide"
  source: /note="Description of Artificial Sequence: Synthetic oligonucleotide"
  modified_base (20)..(21): a, c, g, u, t, unknown or other
cccuugcuacuguagagggnn

SEQ ID NO: 1966 - DNA, 21 bp, Artificial Sequence
  source: /note="Description of Combined DNA/RNA Molecule: Synthetic oligonucleotide"
  source: /note="Description of Artificial Sequence: Synthetic oligonucleotide"
  modified_base (20)..(21): a, c, g, u, t, unknown or other
cccucuacaguagcaagggnn

SEQ ID NO: 1967 - DNA, 21 bp, Artificial Sequence
  source: /note="Description of Combined DNA/RNA Molecule: Synthetic oligonucleotide"
  source: /note="Description of Artificial Sequence: Synthetic oligonucleotide"
  modified_base (20)..(21): a, c, g, u, t, unknown or other
ugcuccucaauggauguugnn

SEQ ID NO: 1968 - DNA, 21 bp, Artificial Sequence
  source: /note="Description of Combined DNA/RNA Molecule: Synthetic oligonucleotide"
  source: /note="Description of Artificial Sequence: Synthetic oligonucleotide"
  modified_base (20)..(21): a, c, g, u, t, unknown or other
caacauccauugaggagcann

SEQ ID NO: 1969 - DNA, 21 bp, Artificial Sequence
  source: /note="Description of Combined DNA/RNA Molecule: Synthetic oligonucleotide"
  source: /note="Description of Artificial Sequence: Synthetic oligonucleotide"
  modified_base (20)..(21): a, c, g, u, t, unknown or other
gaucugcuccucaauggaunn

SEQ ID NO: 1970 - DNA, 21 bp, Artificial Sequence
  source: /note="Description of Combined DNA/RNA Molecule: Synthetic oligonucleotide"
  source: /note="Description of Artificial Sequence: Synthetic oligonucleotide"
  modified_base (20)..(21): a, c, g, u, t, unknown or other
auccauugaggagcagaucnn

SEQ ID NO: 1971 - DNA, 21 bp, Artificial Sequence
  source: /note="Description of Combined DNA/RNA Molecule: Synthetic oligonucleotide"
  source: /note="Description of Artificial Sequence: Synthetic oligonucleotide"
  modified_base (20)..(21): a, c, g, u, t, unknown or other
aucugcuccucaauggaugnn

SEQ ID NO: 1972 - DNA, 21 bp, Artificial Sequence
  source: /note="Description of Combined DNA/RNA Molecule: Synthetic oligonucleotide"
  source: /note="Description of Artificial Sequence: Synthetic oligonucleotide"
  modified_base (20)..(21): a, c, g, u, t, unknown or other
cauccauugaggagcagaunn

SEQ ID NO: 1973 - DNA, 21 bp, Artificial Sequence
  source: /note="Description of Combined DNA/RNA Molecule: Synthetic oligonucleotide"
  source: /note="Description of Artificial Sequence: Synthetic oligonucleotide"
  modified_base (20)..(21): a, c, g, u, t, unknown or other
ucugcuccucaauggaugunn

SEQ ID NO: 1974 - DNA, 21 bp, Artificial Sequence
  source: /note="Description of Combined DNA/RNA Molecule: Synthetic oligonucleotide"
  source: /note="Description of Artificial Sequence: Synthetic oligonucleotide"
  modified_base (20)..(21): a, c, g, u, t, unknown or other
acauccauugaggagcagann

SEQ ID NO: 1975 - DNA, 21 bp, Artificial Sequence
  source: /note="Description of Combined DNA/RNA Molecule: Synthetic oligonucleotide"
  source: /note="Description of Artificial Sequence: Synthetic oligonucleotide"
  modified_base (20)..(21): a, c, g, u, t, unknown or other
cugcuccucaauggauguunn

SEQ ID NO: 1976 - DNA, 21 bp, Artificial Sequence
  source: /note="Description of Combined DNA/RNA Molecule: Synthetic oligonucleotide"
  source: /note="Description of Artificial Sequence: Synthetic oligonucleotide"
  modified_base (20)..(21): a, c, g, u, t, unknown or other
aacauccauugaggagcagnn

SEQ ID NO: 1977 - DNA, 21 bp, Artificial Sequence
  source: /note="Description of Combined DNA/RNA Molecule: Synthetic oligonucleotide"
  source: /note="Description of Artificial Sequence: Synthetic oligonucleotide"
  modified_base (20)..(21): a, c, g, u, t, unknown or other
guuguacgggacuguaacann

SEQ ID NO: 1978 - DNA, 21 bp, Artificial Sequence
  source: /note="Description of Combined DNA/RNA Molecule: Synthetic oligonucleotide"
  source: /note="Description of Artificial Sequence: Synthetic oligonucleotide"
  modified_base (20)..(21): a, c, g, u, t, unknown or other
uguuacagucccguacaacnn

SEQ ID NO: 1979 - DNA, 21 bp, Artificial Sequence
  source: /note="Description of Combined DNA/RNA Molecule: Synthetic oligonucleotide"
  source: /note="Description of Artificial Sequence: Synthetic oligonucleotide"
  modified_base (20)..(21): a, c, g, u, t, unknown or other
uguacgggacuguaacaccnn

SEQ ID NO: 1980 - DNA, 21 bp, Artificial Sequence
  source: /note="Description of Combined DNA/RNA Molecule: Synthetic oligonucleotide"
  source: /note="Description of Artificial Sequence: Synthetic oligonucleotide"
  modified_base (20)..(21): a, c, g, u, t, unknown or other
gguguuacagucccguacann

SEQ ID NO: 1981 - DNA, 21 bp, Artificial Sequence
  source: /note="Description of Combined DNA/RNA Molecule: Synthetic oligonucleotide"
  source: /note="Description of Artificial Sequence: Synthetic oligonucleotide"
  modified_base (20)..(21): a, c, g, u, t, unknown or other
guacgggacuguaacaccunn

SEQ ID NO: 1982 - DNA, 21 bp, Artificial Sequence
  source: /note="Description of Combined DNA/RNA Molecule: Synthetic oligonucleotide"
  source: /note="Description of Artificial Sequence: Synthetic oligonucleotide"
  modified_base (20)..(21): a, c, g, u, t, unknown or other
agguguuacagucccguacnn

SEQ ID NO: 1983 - DNA, 21 bp, Artificial Sequence
  source: /note="Description of Combined DNA/RNA Molecule: Synthetic oligonucleotide"
  source: /note="Description of Artificial Sequence: Synthetic oligonucleotide"
  modified_base (20)..(21): a, c, g, u, t, unknown or other
cagccugauuuugguacaunn

SEQ ID NO: 1984 - DNA, 21 bp, Artificial Sequence
  source: /note="Description of Combined DNA/RNA Molecule: Synthetic oligonucleotide"
  source: /note="Description of Artificial Sequence: Synthetic oligonucleotide"
  modified_base (20)..(21): a, c, g, u, t, unknown or other
auguaccaaaaucaggcugnn

SEQ ID NO: 1985 - DNA, 21 bp, Artificial Sequence
  source: /note="Description of Combined DNA/RNA Molecule: Synthetic oligonucleotide"
  source: /note="Description of Artificial Sequence: Synthetic oligonucleotide"
  modified_base (20)..(21): a, c, g, u, t, unknown or other
gaauagggaggaauccaugnn

SEQ ID NO: 1986 - DNA, 21 bp, Artificial Sequence
  source: /note="Description of Combined DNA/RNA Molecule: Synthetic oligonucleotide"
  source: /note="Description of Artificial Sequence: Synthetic oligonucleotide"
  modified_base (20)..(21): a, c, g, u, t, unknown or other
cauggauuccucccuauucnn

SEQ ID NO: 1987 - DNA, 21 bp, Artificial Sequence
  source: /note="Description of Combined DNA/RNA Molecule: Synthetic oligonucleotide"
  source: /note="Description of Artificial Sequence: Synthetic oligonucleotide"
  modified_base (20)..(21): a, c, g, u, t, unknown or other
aagugcugaauagggaggann

SEQ ID NO: 1988 - DNA, 21 bp, Artificial Sequence
  source: /note="Description of Combined DNA/RNA Molecule: Synthetic oligonucleotide"
  source: /note="Description of Artificial Sequence: Synthetic oligonucleotide"
  modified_base (20)..(21): a, c, g, u, t, unknown or other
uccucccuauucagcacuunn

SEQ ID NO: 1989 - DNA, 21 bp, Artificial Sequence
  source: /note="Description of Combined DNA/RNA Molecule: Synthetic oligonucleotide"
  source: /note="Description of Artificial Sequence: Synthetic oligonucleotide"
  modified_base (20)..(21): a, c, g, u, t, unknown or other
aggcugcugcuacuauagann

SEQ ID NO: 1990 - DNA, 21 bp, Artificial Sequence
  source: /note="Description of Combined DNA/RNA Molecule: Synthetic oligonucleotide"
  source: /note="Description of Artificial Sequence: Synthetic oligonucleotide"
  modified_base (20)..(21): a, c, g, u, t, unknown or other
ucuauaguagcagcagccunn

SEQ ID NO: 1991 - DNA, 21 bp, Artificial Sequence
  source: /note="Description of Combined DNA/RNA Molecule: Synthetic oligonucleotide"
  source: /note="Description of Artificial Sequence: Synthetic oligonucleotide"
  modified_base (20)..(21): a, c, g, u, t, unknown or other
agacagccauaugcaguagnn

SEQ ID NO: 1992 - DNA, 21 bp, Artificial Sequence
  source: /note="Description of Combined DNA/RNA Molecule: Synthetic oligonucleotide"
  source: /note="Description of Artificial Sequence: Synthetic oligonucleotide"
  modified_base (20)..(21): a, c, g, u, t, unknown or other
cuacugcauauggcugucunn

SEQ ID NO: 1993 - DNA, 21 bp, Artificial Sequence
  source: /note="Description of Combined DNA/RNA Molecule: Synthetic oligonucleotide"
  source: /note="Description of Artificial Sequence: Synthetic oligonucleotide"
  modified_base (20)..(21): a, c, g, u, t, unknown or other
uucagguucaugggugccgnn

SEQ ID NO: 1994 - DNA, 21 bp, Artificial Sequence
  source: /note="Description of Combined DNA/RNA Molecule: Synthetic oligonucleotide"
  source: /note="Description of Artificial Sequence: Synthetic oligonucleotide"
  modified_base (20)..(21): a, c, g, u, t, unknown or other
cggcacccaugaaccugaann

SEQ ID NO: 1995 - DNA, 21 bp, Artificial Sequence
  source: /note="Description of Combined DNA/RNA Molecule: Synthetic oligonucleotide"
  source: /note="Description of Artificial Sequence: Synthetic oligonucleotide"
  modified_base (20)..(21): a, c, g, u, t, unknown or other
uagacagccauaugcaguann

SEQ ID NO: 1996 - DNA, 21 bp, Artificial Sequence
  source: /note="Description of Combined DNA/RNA Molecule: Synthetic oligonucleotide"
  source: /note="Description of Artificial Sequence: Synthetic oligonucleotide"
  modified_base (20)..(21): a, c, g, u, t, unknown or other
uacugcauauggcugucuann

SEQ ID NO: 1997 - DNA, 21 bp, Artificial Sequence
  source: /note="Description of Combined DNA/RNA Molecule: Synthetic oligonucleotide"
  source: /note="Description of Artificial Sequence: Synthetic oligonucleotide"
  modified_base (20)..(21): a, c, g, u, t, unknown or other
ggagcaugacuuuaacccann

SEQ ID NO: 1998 - DNA, 21 bp, Artificial Sequence
  source: /note="Description of Combined DNA/RNA Molecule: Synthetic oligonucleotide"
  source: /note="Description of Artificial Sequence: Synthetic oligonucleotide"
  modified_base (20)..(21): a, c, g, u, t, unknown or other
uggguuaaagucaugcuccnn

SEQ ID NO: 1999 - DNA, 21 bp, Artificial Sequence
  source: /note="Description of Combined DNA/RNA Molecule: Synthetic oligonucleotide"
  source: /note="Description of Artificial Sequence: Synthetic oligonucleotide"
  modified_base (20)..(21): a, c, g, u, t, unknown or other
guugccuuuacuuuuagggnn

SEQ ID NO: 2000 - DNA, 21 bp, Artificial Sequence
  source: /note="Description of Combined DNA/RNA Molecule: Synthetic oligonucleotide"
  source: /note="Description of Artificial Sequence: Synthetic oligonucleotide"
  modified_base (20)..(21): a, c, g, u, t, unknown or other
cccuaaaaguaaaggcaacnn

SEQ ID NO: 2001 - DNA, 21 bp, Artificial Sequence
  source: /note="Description of Combined DNA/RNA Molecule: Synthetic oligonucleotide"
  source: /note="Description of Artificial Sequence: Synthetic oligonucleotide"
  modified_base (20)..(21): a, c, g, u, t, unknown or other
ugugacuuaacccaagaagnn

SEQ ID NO: 2002 - DNA, 21 bp, Artificial Sequence
  source: /note="Description of Combined DNA/RNA Molecule: Synthetic oligonucleotide"
  source: /note="Description of Artificial Sequence: Synthetic oligonucleotide"
  modified_base (20)..(21): a, c, g, u, t, unknown or other
cuucuuggguuaagucacann

SEQ ID NO: 2003 - DNA, 21 bp, Artificial Sequence
  source: /note="Description of Combined DNA/RNA Molecule: Synthetic oligonucleotide"
  source: /note="Description of Artificial Sequence: Synthetic oligonucleotide"
  modified_base (20)..(21): a, c, g, u, t, unknown or other
uauugcuuugauugcuucann

SEQ ID NO: 2004 - DNA, 21 bp, Artificial Sequence
  source: /note="Description of Combined DNA/RNA Molecule: Synthetic oligonucleotide"
  source: /note="Description of Artificial Sequence: Synthetic oligonucleotide"
  modified_base (20)..(21): a, c, g, u, t, unknown or other
ugaagcaaucaaagcaauann

SEQ ID NO: 2005 - DNA, 21 bp, Artificial Sequence
  source: /note="Description of Combined DNA/RNA Molecule: Synthetic oligonucleotide"
  source: /note="Description of Artificial Sequence: Synthetic oligonucleotide"
  modified_base (20)..(21): a, c, g, u, t, unknown or other
auauccuguugaauguuggnn

SEQ ID NO: 2006 - DNA, 21 bp, Artificial Sequence
  source: /note="Description of Combined DNA/RNA Molecule: Synthetic oligonucleotide"
  source: /note="Description of Artificial Sequence: Synthetic oligonucleotide"
  modified_base (20)..(21): a, c, g, u, t, unknown or other
ccaacauucaacaggauaunn

SEQ ID NO: 2007 - DNA, 21 bp, Artificial Sequence
  source: /note="Description of Combined DNA/RNA Molecule: Synthetic oligonucleotide"
  source: /note="Description of Artificial Sequence: Synthetic oligonucleotide"
  modified_base (20)..(21): a, c, g, u, t, unknown or other
uuuauugcaaggaauggccnn

SEQ ID NO: 2008 - DNA, 21 bp, Artificial Sequence
  source: /note="Description of Combined DNA/RNA Molecule: Synthetic oligonucleotide"
  source: /note="Description of Artificial Sequence: Synthetic oligonucleotide"
  modified_base (20)..(21): a, c, g, u, t, unknown or other
ggccauuccuugcaauaaann

SEQ ID NO: 2009 - DNA, 21 bp, Artificial Sequence
  source: /note="Description of Combined DNA/RNA Molecule: Synthetic oligonucleotide"
  source: /note="Description of Artificial Sequence: Synthetic oligonucleotide"
  modified_base (20)..(21): a, c, g, u, t, unknown or other
uggaagaaacuacuugggcnn

SEQ ID NO: 2010 - DNA, 21 bp, Artificial Sequence
  source: /note="Description of Combined DNA/RNA Molecule: Synthetic oligonucleotide"
  source: /note="Description of Artificial Sequence: Synthetic oligonucleotide"
  modified_base (20)..(21): a, c, g, u, t, unknown or other
gcccaaguaguuucuuccann

SEQ ID NO: 2011 - DNA, 21 bp, Artificial Sequence
  source: /note="Description of Combined DNA/RNA Molecule: Synthetic oligonucleotide"
  source: /note="Description of Artificial Sequence: Synthetic oligonucleotide"
  modified_base (20)..(21): a, c, g, u, t, unknown or other
aagacccuaaagacuuuccnn

SEQ ID NO: 2012 - DNA, 21 bp, Artificial Sequence
  source: /note="Description of Combined DNA/RNA Molecule: Synthetic oligonucleotide"
  source: /note="Description of Artificial Sequence: Synthetic oligonucleotide"
  modified_base (20)..(21): a, c, g, u, t, unknown or other
ggaaagucuuuagggucuunn

SEQ ID NO: 2013 - DNA, 21 bp, Artificial Sequence
  source: /note="Description of Combined DNA/RNA Molecule: Synthetic oligonucleotide"
  source: /note="Description of Artificial Sequence: Synthetic oligonucleotide"
  modified_base (20)..(21): a, c, g, u, t, unknown or other
uggauguugccuuuacuuunn

SEQ ID NO: 2014 - DNA, 21 bp, Artificial Sequence
  source: /note="Description of Combined DNA/RNA Molecule: Synthetic oligonucleotide"
  source: /note="Description of Artificial Sequence: Synthetic oligonucleotide"
  modified_base (20)..(21): a, c, g, u, t, unknown or other
aaaguaaaggcaacauccann

SEQ ID NO: 2015 - DNA, 21 bp, Artificial Sequence
  source: /note="Description of Combined DNA/RNA Molecule: Synthetic oligonucleotide"
  source: /note="Description of Artificial Sequence: Synthetic oligonucleotide"
  modified_base (20)..(21): a, c, g, u, t, unknown or other
uuugauugcuucagacaaunn

SEQ ID NO: 2016 - DNA, 21 bp, Artificial Sequence
  source: /note="Description of Combined DNA/RNA Molecule: Synthetic oligonucleotide"
  source: /note="Description of Artificial Sequence: Synthetic oligonucleotide"
  modified_base (20)..(21): a, c, g, u, t, unknown or other
auugucugaagcaaucaaann

SEQ ID NO: 2017 - DNA, 21 bp, Artificial Sequence
  source: /note="Description of Combined DNA/RNA Molecule: Synthetic oligonucleotide"
  source: /note="Description of Artificial Sequence: Synthetic oligonucleotide"
  modified_base (20)..(21): a, c, g, u, t, unknown or other
aauagggaggaauccauggnn

SEQ ID NO: 2018 - DNA, 21 bp, Artificial Sequence
  source: /note="Description of Combined DNA/RNA Molecule: Synthetic oligonucleotide"
  source: /note="Description of Artificial Sequence: Synthetic oligonucleotide"
  modified_base (20)..(21): a, c, g, u, t, unknown or other
ccauggauuccucccuauunn

SEQ ID NO: 2019 - DNA, 21 bp, Artificial Sequence
  source: /note="Description of Combined DNA/RNA Molecule: Synthetic oligonucleotide"
  source: /note="Description of Artificial Sequence: Synthetic oligonucleotide"
  modified_base (20)..(21): a, c, g, u, t, unknown or other
ggacaaagugcugaauaggnn

SEQ ID NO: 2020 - DNA, 21 bp, Artificial Sequence
  source: /note="Description of Combined DNA/RNA Molecule: Synthetic oligonucleotide"
  source: /note="Description of Artificial Sequence: Synthetic oligonucleotide"
  modified_base (20)..(21): a, c, g, u, t, unknown or other
ccuauucagcacuuuguccnn

SEQ ID NO: 2021 - DNA, 21 bp, Artificial Sequence
  source: /note="Description of Combined DNA/RNA Molecule: Synthetic oligonucleotide"
  source: /note="Description of Artificial Sequence: Synthetic oligonucleotide"
  modified_base (20)..(21): a, c, g, u, t, unknown or other
uggacaaagugcugaauagnn

SEQ ID NO: 2022 - DNA, 21 bp, Artificial Sequence
  source: /note="Description of Combined DNA/RNA Molecule: Synthetic oligonucleotide"
  source: /note="Description of Artificial Sequence: Synthetic oligonucleotide"
  modified_base (20)..(21): a, c, g, u, t, unknown or other
cuauucagcacuuuguccann

SEQ ID NO: 2023 - DNA, 21 bp, Artificial Sequence
  source: /note="Description of Combined DNA/RNA Molecule: Synthetic oligonucleotide"
  source: /note="Description of Artificial Sequence: Synthetic oligonucleotide"
  modified_base (20)..(21): a, c, g, u, t, unknown or other
aaauugcaucccuugcuacnn

SEQ ID NO: 2024 - DNA, 21 bp, Artificial Sequence
  source: /note="Description of Combined DNA/RNA Molecule: Synthetic oligonucleotide"
  source: /note="Description of Artificial Sequence: Synthetic oligonucleotide"
  modified_base (20)..(21): a, c, g, u, t, unknown or other
guagcaagggaugcaauuunn

SEQ ID NO: 2025 - DNA, 21 bp, Artificial Sequence
  source: /note="Description of Combined DNA/RNA Molecule: Synthetic oligonucleotide"
  source: /note="Description of Artificial Sequence: Synthetic oligonucleotide"
  modified_base (20)..(21): a, c, g, u, t, unknown or other
gcaucccuugcuacuguagnn

SEQ ID NO: 2026 - DNA, 21 bp, Artificial Sequence
  source: /note="Description of Combined DNA/RNA Molecule: Synthetic oligonucleotide"
  source: /note="Description of Artificial Sequence: Synthetic oligonucleotide"
  modified_base (20)..(21): a, c, g, u, t, unknown or other
cuacaguagcaagggaugcnn

SEQ ID NO: 2027 - DNA, 21 bp, Artificial Sequence
  source: /note="Description of Combined DNA/RNA Molecule: Synthetic oligonucleotide"
  source: /note="Description of Artificial Sequence: Synthetic oligonucleotide"
  modified_base (20)..(21): a, c, g, u, t, unknown or other
aaaaaaagguagaagacccnn

SEQ ID NO: 2028 - DNA, 21 bp, Artificial Sequence
  source: /note="Description of Combined DNA/RNA Molecule: Synthetic oligonucleotide"
  source: /note="Description of Artificial Sequence: Synthetic oligonucleotide"
  modified_base (20)..(21): a, c, g, u, t, unknown or other
gggucuucuaccuuuuuuunn

SEQ ID NO: 2029 - DNA, 21 bp, Artificial Sequence
  source: /note="Description of Combined DNA/RNA Molecule: Synthetic oligonucleotide"
  source: /note="Description of Artificial Sequence: Synthetic oligonucleotide"
  modified_base (20)..(21): a, c, g, u, t, unknown or other
acagagcacaaggcguaccnn

SEQ ID NO: 2030 - DNA, 21 bp, Artificial Sequence
  source: /note="Description of Combined DNA/RNA Molecule: Synthetic oligonucleotide"
  source: /note="Description of Artificial Sequence: Synthetic oligonucleotide"
  modified_base (20)..(21): a, c, g, u, t, unknown or other
gguacgccuugugcucugunn

SEQ ID NO: 2031 - DNA, 21 bp, Artificial Sequence
  source: /note="Description of Combined DNA/RNA Molecule: Synthetic oligonucleotide"
  source: /note="Description of Artificial Sequence: Synthetic oligonucleotide"
  modified_base (20)..(21): a, c, g, u, t, unknown or other
ugauuuugguacauggaaunn

SEQ ID NO: 2032 - DNA, 21 bp, Artificial Sequence
  source: /note="Description of Combined DNA/RNA Molecule: Synthetic oligonucleotide"
  source: /note="Description of Artificial Sequence: Synthetic oligonucleotide"
  modified_base (20)..(21): a, c, g, u, t, unknown or other
auuccauguaccaaaaucann

SEQ ID NO: 2033 - DNA, 21 bp, Artificial Sequence
  source: /note="Description of Combined DNA/RNA Molecule: Synthetic oligonucleotide"
  source: /note="Description of Artificial Sequence: Synthetic oligonucleotide"
  modified_base (20)..(21): a, c, g, u, t, unknown or other
ggguuguacgggacuguaann

SEQ ID NO: 2034 - DNA, 21 bp, Artificial Sequence
  source: /note="Description of Combined DNA/RNA Molecule: Synthetic oligonucleotide"
  source: /note="Description of Artificial Sequence: Synthetic oligonucleotide"
  modified_base (20)..(21): a, c, g, u, t, unknown or other
uuacagucccguacaacccnn

SEQ ID NO: 2035 - DNA, 21 bp, Artificial Sequence
  source: /note="Description of Combined DNA/RNA Molecule: Synthetic oligonucleotide"
  source: /note="Description of Artificial Sequence: Synthetic oligonucleotide"
  modified_base (20)..(21): a, c, g, u, t, unknown or other
gguuguacgggacuguaacnn

SEQ ID NO: 2036 - DNA, 21 bp, Artificial Sequence
  source: /note="Description of Combined DNA/RNA Molecule: Synthetic oligonucleotide"
  source: /note="Description of Artificial Sequence: Synthetic oligonucleotide"
  modified_base (20)..(21): a, c, g, u, t, unknown or other
guuacagucccguacaaccnn

SEQ ID NO: 2037 - DNA, 21 bp, Artificial Sequence
  source: /note="Description of Combined DNA/RNA Molecule: Synthetic oligonucleotide"
  source: /note="Description of Artificial Sequence: Synthetic oligonucleotide"
  modified_base (20)..(21): a, c, g, u, t, unknown or other
acgggacuguaacaccugcnn

SEQ ID NO: 2038 - DNA, 21 bp, Artificial Sequence
  source: /note="Description of Combined DNA/RNA Molecule: Synthetic oligonucleotide"
  source: /note="Description of Artificial Sequence: Synthetic oligonucleotide"
  modified_base (20)..(21): a, c, g, u, t, unknown or other
gcagguguuacagucccgunn

SEQ ID NO: 2039 - DNA, 21 bp, Artificial Sequence
  source: /note="Description of Combined DNA/RNA Molecule: Synthetic oligonucleotide"
  source: /note="Description of Artificial Sequence: Synthetic oligonucleotide"
  modified_base (20)..(21): a, c, g, u, t, unknown or other
gggacuguaacaccugcucnn

SEQ ID NO: 2040 - DNA, 21 bp, Artificial Sequence
  source: /note="Description of Combined DNA/RNA Molecule: Synthetic oligonucleotide"
  source: /note="Description of Artificial Sequence: Synthetic oligonucleotide"
  modified_base (20)..(21): a, c, g, u, t, unknown or other
gagcagguguuacagucccnn

SEQ ID NO: 2041 - DNA, 21 bp, Artificial Sequence
  source: /note="Description of Combined DNA/RNA Molecule: Synthetic oligonucleotide"
  source: /note="Description of Artificial Sequence: Synthetic oligonucleotide"
  modified_base (20)..(21): a, c, g, u, t, unknown or other
acuccagaaaugggugaccnn

SEQ ID NO: 2042 - DNA, 21 bp, Artificial Sequence
  source: /note="Description of Combined DNA/RNA Molecule: Synthetic oligonucleotide"
  source: /note="Description of Artificial Sequence: Synthetic oligonucleotide"
  modified_base (20)..(21): a, c, g, u, t, unknown or other
ggucacccauuucuggagunn

SEQ ID NO: 2043 - DNA, 21 bp, Artificial Sequence
  source: /note="Description of Combined DNA/RNA Molecule: Synthetic oligonucleotide"
  source: /note="Description of Artificial Sequence: Synthetic oligonucleotide"
  modified_base (20)..(21): a, c, g, u, t, unknown or other
ccugauuuugguacauggann

SEQ ID NO: 2044 - DNA, 21 bp, Artificial Sequence
  source: /note="Description of Combined DNA/RNA Molecule: Synthetic oligonucleotide"
  source: /note="Description of Artificial Sequence: Synthetic oligonucleotide"
  modified_base (20)..(21): a, c, g, u, t, unknown or other
uccauguaccaaaaucaggnn

SEQ ID NO: 2045 - DNA, 21 bp, Artificial Sequence
  source: /note="Description of Combined DNA/RNA Molecule: Synthetic oligonucleotide"
  source: /note="Description of Artificial Sequence: Synthetic oligonucleotide"
ggccuugaccucuuagagatt

SEQ ID NO: 2046 - DNA, 21 bp, Artificial Sequence
  source: /note="Description of Combined DNA/RNA Molecule: Synthetic oligonucleotide"
  source: /note="Description of Artificial Sequence: Synthetic oligonucleotide"
ucucuaagaggucaaggcctt

SEQ ID NO: 2047 - DNA, 21 bp, Artificial Sequence
  source: /note="Description of Combined DNA/RNA Molecule: Synthetic oligonucleotide"
  source: /note="Description of Artificial Sequence: Synthetic oligonucleotide"
ggccuugaccucuuagagatt

SEQ ID NO: 2048 - DNA, 21 bp, Artificial Sequence
  source: /note="Description of Combined DNA/RNA Molecule: Synthetic oligonucleotide"
  source: /note="Description of Artificial Sequence: Synthetic oligonucleotide"
ucucuaagaggucaaggcctt

SEQ ID NO: 2049 - DNA, 21 bp, Artificial Sequence
  source: /note="Description of Combined DNA/RNA Molecule: Synthetic oligonucleotide"
  source: /note="Description of Artificial Sequence: Synthetic oligonucleotide"
ggccuugaccucuuagagatt

SEQ ID NO: 2050 - DNA, 21 bp, Artificial Sequence
  source: /note="Description of Combined DNA/RNA Molecule: Synthetic oligonucleotide"
  source: /note="Description of Artificial Sequence: Synthetic oligonucleotide"
ucucuaagaggucaaggcctt

SEQ ID NO: 2051 - DNA, 21 bp, Artificial Sequence
  source: /note="Description of Combined DNA/RNA Molecule: Synthetic oligonucleotide"
  source: /note="Description of Artificial Sequence: Synthetic oligonucleotide"
ggccuugaccucuuagagatt

SEQ ID NO: 2052 - DNA, 21 bp, Artificial Sequence
  source: /note="Description of Combined DNA/RNA Molecule: Synthetic oligonucleotide"
  source: /note="Description of Artificial Sequence: Synthetic oligonucleotide"
ucucuaagaggucaaggcctt

SEQ ID NO: 2053 - RNA, 23 nt, Artificial Sequence
  source: /note="Description of Artificial Sequence: Synthetic oligonucleotide"
ggccuugaccucuuagagauuuu

SEQ ID NO: 2054 - RNA, 25 nt, Artificial Sequence
  source: /note="Description of Artificial Sequence: Synthetic oligonucleotide"
aaaaucucuaagaggucaaggccug

SEQ ID NO: 2055 - DNA, 21 bp, Artificial Sequence
  source: /note="Description of Combined DNA/RNA Molecule: Synthetic oligonucleotide"
  source: /note="Description of Artificial Sequence: Synthetic oligonucleotide"
ggccuugaccucuuagagatt

SEQ ID NO: 2056 - DNA, 21 bp, Artificial Sequence
  source: /note="Description of Combined DNA/RNA Molecule: Synthetic oligonucleotide"
  source: /note="Description of Artificial Sequence: Synthetic oligonucleotide"
ucucuaagaggucaaggcctt

SEQ ID NO: 2057 - RNA, 19 nt, Unknown
  source: /note="Description of Unknown: Mammalian sequence"
ggccuugaccucuuagaga

SEQ ID NO: 2058 - RNA, 19 nt, Unknown
  source: /note="Description of Unknown: Mammalian sequence"
ucucuaagaggucaaggcc

SEQ ID NO: 2059 - RNA, 19 nt, Unknown
  source: /note="Description of Unknown: Mammalian sequence"
ggccuugaccucuuagaga

SEQ ID NO: 2060 - RNA, 19 nt, Unknown
  source: /note="Description of Unknown: Mammalian sequence"
ucucuaagaggucaaggcc

SEQ ID NO: 2061 - RNA, 19 nt, Unknown
  source: /note="Description of Unknown: Mammalian sequence"
ggccuugaccucuuagaga

SEQ ID NO: 2062 - RNA, 19 nt, Unknown
  source: /note="Description of Unknown: Mammalian sequence"
ucucuaagaggucaaggcc

SEQ ID NO: 2063 - RNA, 19 nt, Unknown
  source: /note="Description of Unknown: Mammalian sequence"
ggccuugaccucuuagaga

SEQ ID NO: 2064 - RNA, 19 nt, Unknown
  source: /note="Description of Unknown: Mammalian sequence"
ucucuaagaggucaaggcc

SEQ ID NO: 2065 - RNA, 23 nt, Unknown
  source: /note="Description of Unknown: Mammalian sequence"
ggccuugaccucuuagagauuuu

SEQ ID NO: 2066 - RNA, 25 nt, Unknown
  source: /note="Description of Unknown: Mammalian sequence"
aaaaucucuaagaggucaaggccug

SEQ ID NO: 2067 - RNA, 19 nt, Unknown
  source: /note="Description of Unknown: Mammalian sequence"
ggccuugaccucuuagaga

SEQ ID NO: 2068 - RNA, 19 nt, Unknown
  source: /note="Description of Unknown: Mammalian sequence"
ucucuaagaggucaaggcc

SEQ ID NO: 2069 - RNA, 19 nt, Unknown
  source: /note="Description of Unknown: Mammalian sequence"
gggcaagcucuauuccuug

SEQ ID NO: 2070 - RNA, 19 nt, Unknown
  source: /note="Description of Unknown: Mammalian sequence"
caaggaauagagcuugccc

SEQ ID NO: 2071 - RNA, 19 nt, Unknown
  source: /note="Description of Unknown: Mammalian sequence"
gccuugaccucuuagagau

SEQ ID NO: 2072 - RNA, 19 nt, Unknown
  source: /note="Description of Unknown: Mammalian sequence"
aucucuaagaggucaaggc

SEQ ID NO: 2073 - RNA, 19 nt, Unknown
  source: /note="Description of Unknown: Mammalian sequence"
ccuugaccucuuagagauu

SEQ ID NO: 2074 - RNA, 19 nt, Unknown
  source: /note="Description of Unknown: Mammalian sequence"
aaucucuaagaggucaagg

SEQ ID NO: 2075 - DNA, 21 bp, Artificial Sequence
  source: /note="Description of Combined DNA/RNA Molecule: Synthetic oligonucleotide"
  source: /note="Description of Artificial Sequence: Synthetic oligonucleotide"
  modified_base (20)..(21): a, c, g, u, t, unknown or other
ggccuugaccucuuagagann

SEQ ID NO: 2076 - DNA, 21 bp, Artificial Sequence
  source: /note="Description of Combined DNA/RNA Molecule: Synthetic oligonucleotide"
  source: /note="Description of Artificial Sequence: Synthetic oligonucleotide"
  modified_base (20)..(21): a, c, g, u, t, unknown or other
ucucuaagaggucaaggccnn

SEQ ID NO: 2077 - DNA, 21 bp, Artificial Sequence
  source: /note="Description of Combined DNA/RNA Molecule: Synthetic oligonucleotide"
  source: /note="Description of Artificial Sequence: Synthetic oligonucleotide"
  modified_base (20)..(21): a, c, g, u, t, unknown or other
ggccuugaccucuuagagann

SEQ ID NO: 2078 - DNA, 21 bp, Artificial Sequence
  source: /note="Description of Combined DNA/RNA Molecule: Synthetic oligonucleotide"
  source: /note="Description of Artificial Sequence: Synthetic oligonucleotide"
  modified_base (20)..(21): a, c, g, u, t, unknown or other
ucucuaagaggucaaggccnn

SEQ ID NO: 2079 - DNA, 21 bp, Artificial Sequence
  source: /note="Description of Combined DNA/RNA Molecule: Synthetic oligonucleotide"
  source: /note="Description of Artificial Sequence: Synthetic oligonucleotide"
  modified_base (20)..(21): a, c, g, u, t, unknown or other
ggccuugaccucuuagagann

SEQ ID NO: 2080 - DNA, 21 bp, Artificial Sequence
  source: /note="Description of Combined DNA/RNA Molecule: Synthetic oligonucleotide"
  source: /note="Description of Artificial Sequence: Synthetic oligonucleotide"
  modified_base (20)..(21): a, c, g, u, t, unknown or other
ucucuaagaggucaaggccnn

SEQ ID NO: 2081 - DNA, 21 bp, Artificial Sequence
  source: /note="Description of Combined DNA/RNA Molecule: Synthetic oligonucleotide"
  source: /note="Description of Artificial Sequence: Synthetic oligonucleotide"
  modified_base (20)..(21): a, c, g, u, t, unknown or other
ggccuugaccucuuagagann

SEQ ID NO: 2082 - DNA, 21 bp, Artificial Sequence
  source: /note="Description of Combined DNA/RNA Molecule: Synthetic oligonucleotide"
  source: /note="Description of Artificial Sequence: Synthetic oligonucleotide"
  modified_base (20)..(21): a, c, g, u, t, unknown or other
ucucuaagaggucaaggccnn

SEQ ID NO: 2083 - DNA, 25 bp, Artificial Sequence
  source: /note="Description of Combined DNA/RNA Molecule: Synthetic oligonucleotide"
  source: /note="Description of Artificial Sequence: Synthetic oligonucleotide"
  modified_base (24)..(25): a, c, g, u, t, unknown or other
ggccuugaccucuuagagauuuunn

SEQ ID NO: 2084 - DNA, 27 bp, Artificial Sequence
  source: /note="Description of Combined DNA/RNA Molecule: Synthetic oligonucleotide"
  source: /note="Description of Artificial Sequence: Synthetic oligonucleotide"
  modified_base (26)..(27): a, c, g, u, t, unknown or other
aaaaucucuaagaggucaaggccugnn

SEQ ID NO: 2085 - DNA, 21 bp, Artificial Sequence
  source: /note="Description of Combined DNA/RNA Molecule: Synthetic oligonucleotide"
  source: /note="Description of Artificial Sequence: Synthetic oligonucleotide"
  modified_base (20)..(21): a, c, g, u, t, unknown or other
ggccuugaccucuuagagann

SEQ ID NO: 2086 - DNA, 21 bp, Artificial Sequence
  source: /note="Description of Combined DNA/RNA Molecule: Synthetic oligonucleotide"
  source: /note="Description of Artificial Sequence: Synthetic oligonucleotide"
  modified_base (20)..(21): a, c, g, u, t, unknown or other
ucucuaagaggucaaggccnn

SEQ ID NO: 2087 - DNA, 21 bp, Artificial Sequence
  source: /note="Description of Combined DNA/RNA Molecule: Synthetic oligonucleotide"
  source: /note="Description of Artificial Sequence: Synthetic oligonucleotide"
  modified_base (20)..(21): a, c, g, u, t, unknown or other
gggcaagcucuauuccuugnn

SEQ ID NO: 2088 - DNA, 21 bp, Artificial Sequence
  source: /note="Description of Combined DNA/RNA Molecule: Synthetic oligonucleotide"
  source: /note="Description of Artificial Sequence: Synthetic oligonucleotide"
  modified_base (20)..(21): a, c, g, u, t, unknown or other
caaggaauagagcuugcccnn

SEQ ID NO: 2089 - DNA, 21 bp, Artificial Sequence
  source: /note="Description of Combined DNA/RNA Molecule: Synthetic oligonucleotide"
  source: /note="Description of Artificial Sequence: Synthetic oligonucleotide"
  modified_base (20)..(21): a, c, g, u, t, unknown or other
gccuugaccucuuagagaunn

SEQ ID NO: 2090 - DNA, 21 bp, Artificial Sequence
  source: /note="Description of Combined DNA/RNA Molecule: Synthetic oligonucleotide"
  source: /note="Description of Artificial Sequence: Synthetic oligonucleotide"
  modified_base (20)..(21): a, c, g, u, t, unknown or other
aucucuaagaggucaaggcnn

SEQ ID NO: 2091 - DNA, 21 bp, Artificial Sequence
  source: /note="Description of Combined DNA/RNA Molecule: Synthetic oligonucleotide"
  source: /note="Description of Artificial Sequence: Synthetic oligonucleotide"
  modified_base (20)..(21): a, c, g, u, t, unknown or other
ccuugaccucuuagagauunn

SEQ ID NO: 2092 - DNA, 21 bp, Artificial Sequence
  source: /note="Description of Combined DNA/RNA Molecule: Synthetic oligonucleotide"
  source: /note="Description of Artificial Sequence: Synthetic oligonucleotide"
  modified_base (20)..(21): a, c, g, u, t, unknown or other
aaucucuaagaggucaaggnn

SEQ ID NO: 2093 - DNA, 21 bp, Artificial Sequence
  source: /note="Description of Combined DNA/RNA Molecule: Synthetic oligonucleotide"
  source: /note="Description of Artificial Sequence: Synthetic oligonucleotide"
ucgaaguacucagcguaagtt

SEQ ID NO: 2094 - DNA, 21 bp, Artificial Sequence
  source: /note="Description of Combined DNA/RNA Molecule: Synthetic oligonucleotide"
  source: /note="Description of Artificial Sequence: Synthetic oligonucleotide"
cuuacgcugaguacuucgatt

SEQ ID NO: 2095 - DNA, 21 bp, Artificial Sequence
  source: /note="Description of Combined DNA/RNA Molecule: Synthetic oligonucleotide"
  source: /note="Description of Artificial Sequence: Synthetic oligonucleotide"
ucucuaagaggucaaggcctt

SEQ ID NO: 2096 - DNA, 21 bp, Artificial Sequence
  source: /note="Description of Combined DNA/RNA Molecule: Synthetic oligonucleotide"
  source: /note="Description of Artificial Sequence: Synthetic oligonucleotide"
ggccuugaccucuuagagatt

SEQ ID NO: 2097 - DNA, 21 bp, Artificial Sequence
  source: /note="Description of Combined DNA/RNA Molecule: Synthetic oligonucleotide"
  source: /note="Description of Artificial Sequence: Synthetic oligonucleotide"
caaggaauagagcuugccctt

SEQ ID NO: 2098 - DNA, 21 bp, Artificial Sequence
  source: /note="Description of Combined DNA/RNA Molecule: Synthetic oligonucleotide"
  source: /note="Description of Artificial Sequence: Synthetic oligonucleotide"
gggcaagcucuauuccuugtt

SEQ ID NO: 2099 - DNA, 21 bp, Artificial Sequence
  source: /note="Description of Combined DNA/RNA Molecule: Synthetic oligonucleotide"
  source: /note="Description of Artificial Sequence: Synthetic oligonucleotide"
aucucuaagaggucaaggctt

SEQ ID NO: 2100 - DNA, 21 bp, Artificial Sequence
  source: /note="Description of Combined DNA/RNA Molecule: Synthetic oligonucleotide"
  source: /note="Description of Artificial Sequence: Synthetic oligonucleotide"
gccuugaccucuuagagautt

SEQ ID NO: 2101 - DNA, 21 bp, Artificial Sequence
  source: /note="Description of Combined DNA/RNA Molecule: Synthetic oligonucleotide"
  source: /note="Description of Artificial Sequence: Synthetic oligonucleotide"
aaucucuaagaggucaaggtt

SEQ ID NO: 2102 - DNA, 21 bp, Artificial Sequence
  source: /note="Description of Combined DNA/RNA Molecule: Synthetic oligonucleotide"
  source: /note="Description of Artificial Sequence: Synthetic oligonucleotide"
ccuugaccucuuagagauutt

SEQ ID NO: 2103 - DNA, 27 bp, Artificial Sequence
  source: /note="Description of Artificial Sequence: Synthetic primer"
ccacctgcctgtgttgagctgagtgtt

SEQ ID NO: 2104 - DNA, 26 bp, Artificial Sequence
  source: /note="Description of Artificial Sequence: Synthetic primer"
ccacagcggtggcacagtggcgtgaa

SEQ ID NO: 2105 - DNA, 5130 bp, JC polyomavirus
gcctcggcctcctgtatatataaaaaaaagggaagggatggctgccagccaagcatgagctcatacctagggagccaaccagctaacagccagtaaacaaagcacaaggctgtatatataaaaaaaagggaagggatggctgccagccaagcatgagctcatacctagggagccaaccagctaacagccagtaaacaaagcacaaggggaagtggaaagcagccaagggaacatgttttgcgagccagagctgttttggcttgtcaccagctggccatggttcttcgccagctgtcacgtaaggcttctgtgaaagttagtaaaacctggagtggaactaaaaaaagagctcaaaggattttaatttttttgttagaatttttgctggacttttgcacaggtgaagacagtgtagacgggaaaaaaagacagagacacagtggtttgactgagcagacatacagtgctttgcctgaaccaaaagctacataggtaagtaatgtttttttttgtgttttcaggttcatgggtgccgcacttgcacttttgggggacctagttgctactgtttctgaggctgctgctgccacaggattttcagtagctgaaattgctgctggagaggctgctgctactatagaagttgaaattgcatcccttgctactgtagaggggattacaagtacctctgaggctatagctgctataggccttactcctgaaacatatgctgtaataactggagctccgggggctgtagctgggtttgctgcattggttcaaactgtaactggtggtagtgctattgctcagttgggatatagattttttgctgactgggatcataaagtttcaacagttgggctttttcagcagccagctatggctttacaattatttaatccagaagactactatgatattttatttcctggagtgaatgcctttgttaacaatattcactatttagatcctagacattggggcccgtccttgttctccacaatctcccaggctttttggaatcttgttagagatgatttgccagccttaacctctcaggaaattcagagaagaacccaaaaactatttgttgaaagtttagcaaggtttttggaagaaactacttgggcaatagttaattcaccagctaacttatataattatatttcagactattattctagattgtctccagttaggccctctatggtaaggcaagttgcccaaagggagggaacctatatttcttttggccactcatacacccaaagtatagatgatgcagacagcattcaagaagttacccaaaggctagatttaaaaaccccaaatgtgcaatctggtgaatttatagaaagaagtattgcaccaggaggtgcaaatcaaagatctgctcctcaatggatgttgcctttacttttagggttgtacgggactgtaacacctgctcttgaagcatatgaagatggccccaacaaaaagaaaaggagaaaggaaggaccccgtgcaagttccaaaacttcttataagaggaggagtagaagttctagaagttaaaactggggttgactcaattacagaggtagaatgctttttaactccagaaatgggtgacccagatgagcatcttaggggttttagtaagtcaatatctatatcagatacatttgaaagtgactccccaaatagggacatgcttccttgttacagtgtggccagaattccactacccaatctaaatgaggatctaacctgtggaaatatactcatgtgggaggctgtgaccttaaaaactgaggttataggggtgacaagtttgatgaatgtgcactctaatgggcaagcaactcatgacaatggtgcagggaagccagtgcagggcaccagctttcattttttttctgttgggggggaggctttagaattacagggggtgctttttaattacagaacaaagtacccagatggaacaatttttccaaagaatgccacagtgcaatctcaagtcatgaacacagagcacaaggcgtacctagataagaacaaagcatatcctgttgaatgttgggttcctgatcccaccagaaatgaaaacacaagatattttgggacactaacaggaggagaaaatgttcctccagttcttcatataacaaacactgccacaacagtgttgcttgatgaatttggtgttgggccactttgcaaaggtgacaacttatacttgtcagctgttgatgtctgtggcatgtttacaaacaggtctggttcccagcagtggagaggactctccagatattttaaggtgcagctaaggaaaaggagggttaaaaacccctacccaatttctttccttcttactgatttaattaacagaaggactcctagagttgatgggcagcctatgtatggcatggatgctcaagtagaggaggttagagtttttgagggaacagaggagcttccaggggacccagacatgatgagatacgttgacaaatatggacagttgcagacaaaaatgctgtaatcaaaagcctttattgtaatatgcagtacattttaataaagtataaccagctttacttaacagttgcagttattttgggggaggggtctttggttttttgaaacattgaaagcctttacagatgtgaaaagtgcagttttcctgtgtgtctgcaccagaggcttctgagacctgggaaaagcattgtgattgtgattcagtgcttgatccatgtccagagtcttctgcttcagaatcttcctctctaggaaagtcaagaatgggtctccccataccaacattagctttcatagtagaaaatgtatacatgcttatttctaaatccagcctttctttccactgcacaatcctctcatgaatggcagctgcaaagtcagcaactggcctaaaccagattaaaagcaaaagcaaagtcataccactttgcaaaatccttttttctagcaaatactcagagcagcttagtgattttctcaggtaggcctttggtctaaaatctatctgccttacaaatctggcctgtaaagttctaggcactgaatattcattcatggttacaattccaggtggaaacacctgtgttcttttgttttggtgttttctctctaaattaacttttacacttccatctaagtaatctcttaagcaatcaaggttgcttatgccatgccctgaaggtaaatcccttgactctgcaccagtgccttttacatcctcaaatacaaccataaactgatctatacccactcctaattcaaagtttaatctttctaatggcatattaacatttaatgactttcccccacagagatcaagtaaagctgcagctaaagtagttttgccactgtctattggccccttgaatagccagtaccttttttttggaatgtttaatacaatgcattttagaaagtcataaataacagtgtccatttgaggcagcaagcaatgaatccaggccaccccagccatatattgctctaaaacagcattgccatgtgccccaaaaattaagtccattttatcaagcaagaaattaaacctttcaactaacatttcttctctggtcatgtggatgctgtcaaccctttgtttggctgctacagtatcaacagcctgctggcaaatgcttttttgatttttgctatctgcaaaaatttgggcattataatagtgtttttcatgatggttaaagtgatttggctgatcctttttttcacattttttgcattgctgtgggttttcctgaaagtctaagtacatgcccataagcaaaaaaacatcctcacacttggtttccaaggcatactgtgtaactaatttccatgaaacctgcttagtttcttctggttcttctgggttaaagtcatgctccttaaggcccccctgaatactttcttccactactgcatatggctgtctacacagggcactataaaacaagtattccttattcacacctttacaaattaaaaaactaaaggtacatagtttttgacagtagttattaattgctgacactctatgtctatgtggtgttaagaaaaacaaaatattatgacccccaaaaccatgtctacttataaaagttacagaatatttttccataagtttcttatataaaatttgagctttttctttagtggtatacacagcaaaagaagcaacagttctattactaaacacagcttgactgaggaatgcatgcagatctacaggaaagtctttagggtcttctaccttttttttctttttaggtggggtagagtgttgggatcctgtgttttcatcatcactggcaaacatttcttcatggcaaaacaggtcttcatcccacttctcattaaatgtattccaccaggattcccattcatctgttccataggttggcacctaaaaaaaaacaattaagtttattgtaaaaaacaaaatgccctgcaaaagaaaaatagtggtttaccttaaagctttagatccctgtagggggtgtctccaagaactttctcccagcaatgaagagcttcttgggttaagtcacacccaaaccattgtctgaagcaatcaaagcaatagcaatctatccacacaagtgggctgcttcttaaaaattttctgtttctatgccttaattttagcatgcacattaaacaggggcaatgcactgaaggattagtggcacagttaggccattccttgcaataaagggtatcagaattaggaggaaaatcacaaccaacctctgaactattccatgtaccaaaatcaggctgatgagcaacttttacaccttgttccatttttttatataaaaaattcattctcttcatcttgtcttcgtccccacctttatcagggtggagttctttgcattttttcagataagcttttctcatgacaggaatgttcccccatgcagacctatcaaggcctaataaatccataagctccatggattcctccctattcagcactttgtccattttagctttttgcagcaaaaaattactgcaaaaaagggaaaaacaagggaatttccctggcctcctaaaaagcctccacgcccttactacttctgagtaagcttggaggcggaggcg

SEQ ID NO: 2106 - DNA, 5222 bp, Homo sapiens
gggtgcccgctccgccccccgggctatgtaaagcggccgggctcgggtcgtgccaccgctggactcccgtgtccctccgcgcaggcgggcggccccggagcgctggtgccggcagaggcggcgacggtggcgcccctcctcatcatgaacagaggcttctcccgaaaaagccacacattcctgcccaagatcttcttccgcaagatgtcatcctcaggggccaaggacaagcctgagctgcagtttcccttccttcaggatgaggacacagtggccacgctgctagagtgcaagacgctcttcatcttgcgcggcctgccaggaagcggcaagtccacgctggcacgggtcatcgtggacaagtaccgtgatggcaccaagatggtgtcggctgacgcttacaagatcacccccggcgctcgaggagccttctccgaggagtacaagcggctcgatgaggacctggctgcctactgccgccgccgggacatcagaattcttgtgcttgatgacaccaaccacgaacgggaacggctggagcagctctttgaaatggccgaccagtaccagtaccaggtggtgctggtggagcccaagacggcgtggcggctggactgtgcccagctcaaggagaagaaccagtggcagctgtcggctgatgacctgaagaagctgaagcctgggctggagaaggacttcctgccgctctacttcggctggttcctgaccaagaagagctctgagaccctccgcaaagccggccaggtcttcctggaagagctggggaaccacaaggccttcaagaaggagctgcgacaattcgtccctggggatgagcccagggagaagatggacttggtcacctactttggaaagagacccccaggcgtgctgcattgcacaaccaagttttgtgactacgggaaggctcccggggcagaggagtacgctcaacaagatgtgttaaagaaatcttactccaaggccttcacgctgaccatctctgccctctttgtgacacccaagacgactggggcccgggtggagttaagcgagcagcaactgcagttgtggccgagtgatgtggacaagctgtcacccactgacaacctgccgcgggggagccgcgcccacatcaccctcggctgtgcagctgacgtagaggccgtgcagacgggccttgacctcttagagattctgcggcaggagaaggggggcagccgaggcgaggaggtgggcgagctaagccggggcaagctctattccttgggcaatgggcgctggatgctgaccctggccaagaacatggaggtcagggccatcttcacggggtactacgggaaaggcaaacctgtgcccacgcaaggtagccggaaggggggcgccttgcagtcctgcaccatcatatgagtgttctcaccaccacttatgcccctagaagggaaggggagagggaaacgtgccctctgtttgatccttgttttgtgacattttttttttttttttttttactcaaagttaacctacctgtaactttttaaaaacttgtaaaataactgaccctcccttcctgtccgccctcttcccctctaatgctcacgctcccaacacaaggtgggcagggaggcaccattcaggaacctggaccaaagctgacgaggctgggccaagccagggatggggccacagccagaaccccgagccctacttccaggttctggttagctcagccccagcccagcccagctgctctgcccagagctgggtgagtggggagacacctcagagccccgcaaaacccactgaccggaggcaaaaggcagtggggctgggggtagttttccatggtcacagagaactagtggtggctctgagaaggggaggacctctgggctttgattccatctccttgtcttttttctttgtttttagagacagggtcctgctatttcccaagctggagtgcagtggtgcgatcatggctcactgcagcctcgaactcctgggctcaagcaatcctcctgagtgatcccatttcttaatcagtgtagccccaagaaggctggggctatttaccagggtagaaaaaggagcttacctcccacctttggtcctaagtccctgccccctccccttcacaccataactaggtaacagtttgataactagggaagaaagcagaacagttaagcagccgccacatccccgctggctgggggcctcactccaggaaggggctggactggctgtcctttccagtggcctggctccgctgtgtggatggggagatcggggccagaggcagaaccctggtgaggaagctccagtcctgctctctacccagcccatcttgcctccatggtgcctctggaggcctctgggcctcctctaacaggggctggtgggcaccaagagccaatggagtagacccctggctggtaagggccaagtcccaccggttgcttctgggaaggggtttctaacactagtctgtgtgctgtggttcctggggtgccctccactgccctctgttcagtaacagggccttgctaatcgggttgtcactcaacaaaagtgctttggatttaagttactatcctggctttgcccaacctcagcaacctgtaagactgataatgaaataaatcatgttaatcctagctgtgtgcagtctctcttacccttctgtgcccagctcagtcttccctagggctgggtgtattaggactggctttgtcccacagcttggggccatcggtcctgtctcccctctgctggccgggcacagctgtggtgaggttgggcagctgaacagtgttggctttcatgaggaggcagaaagcagaggctggcctcagactcatacagaaggtgggggttggctgggtacgagggatgtggagcacaaaagcctctcatcccccattaaccagggcaccaagcccacaggtgtccccagcccactggatcagaaagagttcagtaagaccggaagctcctggtatgggtttctcccagttctctagggaaggccacctgcaggtcactgaaacttcaagcaccagggaagatctaacatttgagtcccttccaggccatcagaggcctagtcagccacatgggaaacttccaagacctgactcaggcatcattccaccatggctaaggcaccagccggggaagacttgaaagaaaggggcaggagctcagatgaagagaaatcctaagttacctttctaggtcaaggcctgtccctggccatctctgaacttcagctagagcttcaagtctgtgcctggagctcctgggaaggctactcaccttgaacaccacgcttgacaggacagcatggtgcatgccgctgcatccgtgagcagtgtgtctcctgcatgcagaaagggagcagagaaggccaggggcttttgctaaaaatagtggccagaccagagctctggagccacctgtcccacctcaaatgggtctgggggtcaggaggcagggttttatctctgtctaccatctccctcgaacccacactgcaacaggaactgtgagagtctttgtaagtaaactgccctgtctaggtcagtacccacctgagctttggacgcacacagcttttagtacccacctgagctttggacacacacagcttctagtgatttctggggccccaccgtaaagtgagcatgctttctgaactcgcttctctgtgactgatgttaggctgggcccagaggcacagccggggcctgcctagcactcacatgctggacaggtctgggagaggcagagtgccccacctgccactaggctgggtgcccacagcccgcatgcagcagcttgctgcaccccaagtccaggtcgggctcagctctggctcacagactggagacaatgcagatgccagagcaaagggccaggaagggtcaaaacattttattctcttttttttttcttttttaataaagttaaacagtaaaacaaaaattcacaagctgcctccctgtccacccccgcctccctcccctgccctcggtcttcggcattggttccctttgctccaccccactcacagagacacagggcatccaactgagaaaacgaaactgctctaagcacacggagacgtgatgaagggaggaggtgaactgtttccacattcaagattaaactgagtgaatctgcattttctgggttctgggtggttgcccttcattagccaaattgaaaaaagaaattccctggaccagatgctgaaagagaaaagaggggttggtagttggctatggattttctaaggaagatcactttgctctgattatggaaaagtcttcaagggctgcttcaaactcaaacacagagagaaactctatgggtatcaaacagctcaggctgtttttgggtgcaagagggagcacgtgactgtattatacatgggtagcttctgacctcagcattatctatatagtacctttgctcttgcagagaagccttggtactaggcagttagagatgcctccctgaccctgcagagatgcggtggctaaaggtcccaaggcaaggggtgcctgggaaccttcctgtcttcatccttagcaacagccgagtggatagatgccctgctagatgagaattcagctgcccccgctcatgggcccctctgactcccaaagagctgcctaagaggcaatgagtgtgttggcttgtgatctgggaactcccaagaacagcaggcccacctaccttcaaagctgaagccgccaggaccgccaaagaatgccttgaagatattgtttggatcaaaatctgtagagcagggcaagtaacatggaagggaagaaaaggtgaaaaattagaaatgttcgaagagaactgatgacactgagaacagatctccaaagctttcctggagagtctcactcccctcctttcccaacacttcagactgcaagtgagcaaacctgccccatcccgtgcaaaacatgctacctgatcccactcctaggacatgttcccttctccttccaactgctgccccaaaggaagctttctctgcttcagcttgcttcattgggctgttttctcaacaaatggaatgccatttgcacttacacaagactttccccatactctgtctccctataatgctggagcggctactaaaaaggataaaatgtatcacttaaatgttaccaaaaataaatataagagcaagatct

We claim:

1. A method of delivering a double-stranded ribonucleic acid (dsRNA) to a subject, comprising delivering the dsRNA by localized delivery into the corpus callosum of the subject, wherein said dsRNA is one of the dsRNAs selected from Tables 8, 10, and 13-16.

2. The method of claim 1, wherein the dsRNA is delivered to an oligodendrocyte of the subject.

3. The method of claim 1 or 2, wherein the dsRNA comprises at least one modified nucleotide.

4. The method of claim 3, wherein the modified nucleotide is chosen from the group consisting of a 2′-O-methyl modified nucleotide, a nucleotide comprising a 5′-phosphorothioate group, a disulfide linker, and a terminal nucleotide linked to a conjugate group.

5. The method of claim 4, wherein the conjugate group is a cholesteryl derivative or vitamin E group.

6. The method of claim 3, wherein the modified nucleotide is chosen from the group consisting of: a 2′-deoxy-2′-fluoro modified nucleotide, a 2′-deoxy-modified nucleotide, a locked nucleotide, an abasic nucleotide, 2′-amino-modified nucleotide, 2′-alkyl-modified nucleotide, morpholino nucleotide, a phosphoramidate, and a non-natural base comprising nucleotide.

7. A method of inhibiting expression of a gene from JC Virus in a subject, comprising delivering a dsRNA by localized delivery into the corpus callosum of the subject, wherein said dsRNA is selected from the dsRNAs of Tables 8, 10, and 13-16.

8. The method of claim 7, wherein the dsRNA is duplex number AD12795.

9. A method of treating, preventing or managing a pathological process mediated by JC virus in a subject, comprising delivering a dsRNA by localized delivery into the corpus callosum of the subject, wherein said dsRNA is selected from the dsRNAs of Tables 8, 10, and 13-16.

10. A method of delivering a double-stranded ribonucleic acid (dsRNA) to a subject, comprising delivering the dsRNA by localized delivery into the corpus callosum of the subject, wherein said dsRNA is selected from the dsRNAs of Tables 1 and 17-19.

11. The method of claim 9, wherein the dsRNA is delivered to an oligodendrocyte of the subject.

12. The method of claim 9, wherein the dsRNA is AD3222.

13. A method of treating, preventing or managing a neurological disorder mediated by CNPase in a subject, comprising delivering a dsRNA by localized delivery into the corpus callosum of the subject, wherein said dsRNA is selected from the dsRNAs of Tables 1 and 17-19.

14. The method of claim 13, wherein the neurological disorder is schizophrenia.

15. A method of decreasing CNPase mRNA levels in a subject, comprising delivering a dsRNA by localized delivery into the corpus callosum of the subject, wherein the dsRNA is selected from the dsRNAs of Tables 1 and 17-19.

16. The method of claim 15, wherein the dsRNA is AD3222.

17. A method of treating a neurodegenerative disease in a subject comprising delivering a dsRNA by localized delivery into the corpus callosum of the subject.

18. The method of claim 17, wherein the neurodegenerative disease is selected from the group consisting of Parkinson's disease, multiple sclerosis, amyotrophic lateral sclerosis, autoimmune encephalomyelitis, Alzheimer's disease, stroke and Huntington's disease.

19. The method of claim 17 or 18, wherein the dsRNA comprises at least one modified nucleotide.

20. The method of claim 19, wherein the modified nucleotide is chosen from the group consisting of a 2′-O-methyl modified nucleotide, a nucleotide comprising a 5′-phosphorothioate group, a disulfide linker, and a terminal nucleotide linked to a conjugate group.

21. The method of claim 20, wherein the conjugate group is a cholesteryl derivative or vitamin E group.
